(19) United States
(12) Patent Application Publication
(10) Pub. No.: US 2024/0344060 A1
(43) Pub. Date: Oct. 17, 2024

(54) COMPOSITIONS AND METHODS FOR THE MODULATION OF ADAPTIVE IMMUNITY

(71) Applicant: Locanabio, Inc., San Diego, CA (US)

(72) Inventors: David A. NELLES, San Diego, CA (US); Ranjan BATRA, San Diego, CA (US); Eugene YEO, San Diego, CA (US)

(21) Appl. No.: 18/505,709

(22) Filed: Nov. 9, 2023

Related U.S. Application Data
(63) Continuation of application No. 16/434,787, filed on Jun. 7, 2019, now abandoned.
(60) Provisional application No. 62/682,276, filed on Jun. 8, 2018.

(51) Int. Cl. C12N 15/11; A61K 48/00

(52) U.S. Cl. CPC C12N 15/11; A61K 48/005; C12N 2310/20

(57) ABSTRACT

Disclosed are compositions and methods for simultaneously providing a gene therapy and preventing an adaptive immune response to a cell modified by the gene therapy by the immune system of a subject. In some embodiments, compositions of the disclosure modify a level of expression of an RNA molecule associated with a disease or disorder as well as inhibit expression or activity of a component of an adaptive immune response to mask the modified cell from a subject's immune system.

### RELATED APPLICATIONS

[0001] This application is a continuation of U.S. application Ser. No. 16/434,787, filed Jun. 7, 2019, which claims priority to, and the benefit of, U.S. Patent Application No. 62/682,276, filed Jun. 8, 2018, the contents of which are herein incorporated by reference in their entirety. The contents of International Application No. PCT/US2019/036021, filed Jun. 7, 2019, U.S. patent application Ser. No. 16/434,689, filed Jun. 7, 2019, and U.S. Patent Application No. 62/682,271, filed Jun. 8, 2018, are herein incorporated by reference in their entirety.

### FIELD OF THE DISCLOSURE

[0002] The disclosure is directed to molecular biology, and more, specifically, to compositions and methods for modifying expression and activity of RNA molecules involved in an adaptive immune response.

### INCORPORATION OF SEQUENCE LISTING

[0003] The instant application contains a Sequence Listing which has been submitted in XML format via Patent Center and is hereby incorporated by reference in its entirety. Said XML copy, created on Nov. 9, 2023 is named “LOCN-003_C01US_ST26.xml” and is 12,263,677 bytes in size.

### BACKGROUND

[0004] There has been a long-felt but unmet need in the art for simultaneously providing a gene therapy and suppressing the adaptive immune response that may arise when the gene therapy is delivered by, for example, a viral vector. The disclosure provides compositions and methods for specifically targeting RNA molecules in a sequence-specific manner that provides a gene therapy in vivo while masking the modified cells from the immune system of a subject, thereby preventing an adaptive immune response to the modified cell.

### SUMMARY

[0005] The disclosure provides a composition comprising a nucleic acid sequence comprising a guide RNA (gRNA) sequence that specifically binds a target RNA sequence, wherein the target RNA sequence encodes a protein component of an adaptive immune response, and wherein the gRNA sequence comprises a spacer sequence comprising a portion of a nucleic acid sequence encoding the protein component, and wherein the protein component is selected from the group consisting of Beta-2-microglobulin (β2M), Human Leukocyte Antigen A (HLA-A), Human Leukocyte Antigen B (HLA-B), Human Leukocyte Antigen C (HLA-C), Cluster of Differentiation 28 (CD28), Cluster of Differentiation 80 (CD80), Cluster of Differentiation 86 (CD86), Inducible T-cell Costimulator (ICOS), ICOS Ligand (ICOSLG), OX40L, Interleukin 12 (IL12), and CC Chemokine Receptor 7 (CCR7).

[0006] The disclosure also provides a composition comprising (a) a first sequence comprising a guide RNA (gRNA) that specifically binds a target sequence within an RNA molecule, wherein the target sequence comprises a sequence encoding a component of an adaptive immune response and (b) a sequence encoding a fusion protein, the sequence comprising a sequence encoding a first RNA-binding polypeptide and a sequence encoding a second RNA-binding polypeptide, wherein neither the first RNA-binding polypeptide nor the second RNA-binding polypeptide comprises a significant DNA-nuclease activity, wherein the first RNA-binding polypeptide and the second RNA-binding polypeptide are not identical, and wherein the second RNA-binding polypeptide comprises an RNA-nuclease activity.

[0007] The disclosure provides a composition comprising: (a) a first sequence comprising a guide RNA (gRNA) that specifically binds a first target sequence within a first RNA molecule, wherein the first target sequence comprises a sequence encoding a component of an adaptive immune response and (b) a second sequence comprising a second guide RNA (gRNA) that specifically binds a second target sequence within a second RNA molecule and (c) a sequence encoding a fusion protein, the sequence comprising a sequence encoding a first RNA-binding polypeptide and a sequence encoding a second RNA-binding polypeptide, wherein neither the first RNA-binding polypeptide nor the second RNA-binding polypeptide comprises a significant DNA-nuclease activity, wherein the first RNA-binding polypeptide and the second RNA-binding polypeptide are not identical, and wherein the second RNA-binding polypeptide comprises an RNA-nuclease activity.

[0008] In some embodiments of the compositions of the disclosure, including those wherein the composition comprises a first sequence comprising a first guide RNA (gRNA) that specifically binds a first target sequence within a first RNA molecule, wherein the first target sequence comprises a sequence encoding a component of an adaptive immune response and a second sequence comprising a second guide RNA (gRNA) that specifically binds a second target sequence within a second RNA molecule, the first target sequence or the second target sequence comprises at least one repeated sequence.

[0009] In some embodiments of the compositions of the disclosure, including those wherein the composition comprises a first sequence comprising a first guide RNA (gRNA) that specifically binds a first target sequence within a first RNA molecule, wherein the first target sequence comprises a sequence encoding a component of an adaptive immune response and a second sequence comprising a second guide RNA (gRNA) that specifically binds a second target sequence within a second RNA molecule, the first sequence comprising a first promoter capable of expressing the gRNA in a eukaryotic cell and/or the second sequence comprising a second promoter capable of expressing the gRNA in a eukaryotic cell. In some embodiments, the first promoter and the second promoter are identical. In some embodiments, the first promoter and the second promoter are not identical.

[0010] In some embodiments of the compositions of the disclosure, including those wherein the composition comprises a first sequence comprising a first guide RNA (gRNA) that specifically binds a first target sequence within a first RNA molecule, wherein the first target sequence comprises a sequence encoding a component of an adaptive immune response, and a second sequence comprising a second guide RNA (gRNA) that specifically binds a second target sequence within a second RNA molecule, the first sequence and second sequence comprising a promoter capable of expressing the first gRNA and the second gRNA in a eukaryotic cell.

[0011] In some embodiments of the compositions of the disclosure, including those wherein a gRNA sequence comprises a promoter capable of expressing the gRNA in a eukaryotic cell, the eukaryotic cell is an animal cell. In some embodiments, the animal cell is a mammalian cell. In some embodiments, the animal cell is a human cell.

[0012] In some embodiments of the compositions of the disclosure, including those wherein a gRNA sequence comprises a promoter capable of expressing the gRNA in a eukaryotic cell, the promoter is a constitutively active promoter.

[0013] In some embodiments of the compositions of the disclosure, including those wherein a gRNA sequence comprises a promoter capable of expressing the gRNA in a eukaryotic cell, the gRNA sequence comprises a sequence isolated or derived from a promoter capable of driving expression of an RNA polymerase. In some embodiments, the promoter sequence is isolated or derived from a U6 promoter.

[0014] In some embodiments of the compositions of the disclosure, including those wherein a gRNA sequence comprises a promoter capable of expressing the gRNA in a eukaryotic cell, the promoter comprises a sequence isolated or derived from a promoter capable of driving expression of a transfer RNA (tRNA). In some embodiments, the promoter sequence is isolated or derived from an alanine tRNA promoter, an arginine tRNA promoter, an asparagine tRNA promoter, an aspartic acid tRNA promoter, a cysteine tRNA promoter, a glutamine tRNA promoter, a glutamic acid tRNA promoter, a glycine tRNA promoter, a histidine tRNA promoter, an isoleucine tRNA promoter, a leucine tRNA promoter, a lysine tRNA promoter, a methionine tRNA promoter, a phenylalanine tRNA promoter, a proline tRNA promoter, a serine tRNA promoter, a threonine tRNA promoter, a tryptophan tRNA promoter, a tyrosine tRNA promoter, or a valine tRNA promoter. In some embodiments, the promoter sequence is isolated or derived from a valine tRNA promoter.

[0015] In some embodiments of the compositions of the disclosure, including those wherein the composition comprises a first sequence comprising a first guide RNA (gRNA) that specifically binds a first target sequence within a first RNA molecule, wherein the first target sequence comprises a sequence encoding a component of an adaptive immune response and a second sequence comprising a second guide RNA (gRNA) that specifically binds a second target sequence within a second RNA molecule, the sequence comprising the first gRNA further comprises a first spacer sequence that specifically binds to the first target RNA sequence. In some embodiments, the first spacer sequence has at least 50%, 55%, 60%, 65%, 70%, 75%, 80%, 87%, 90%, 95%, 97%, 99% or any percentage in between of complementarity to the first target RNA sequence. In some embodiments, the first spacer sequence has 100% complementarity to the target RNA sequence. In some embodiments, the first spacer sequence comprises or consists of 20 nucleotides. In some embodiments, the first spacer sequence comprises or consists of 21 nucleotides. In some embodiments, the first spacer sequence comprises or consists of 20 nucleotides of an amino acid sequence encoding a Beta-2-microglobulin (β2M) protein. In some embodiments, the first spacer sequence comprises or consists of 20 nucleotides of an amino acid sequence of

(SEQ ID NO: 88)

MSRSVALAVL ALLSLSGLEA IQRTPKIQVY SRHPADIEVD
LLKNGERIEK VEHSDLSFSK DWSFYLLYYT EFTPTEKDEY
ACRVNHVTLS QPKIVKWDRD M.

[0016] In some embodiments of the compositions of the disclosure, including those wherein the composition comprises a first sequence comprising a first guide RNA (gRNA) that specifically binds a first target sequence within a first RNA molecule, wherein the first target sequence comprises a sequence encoding a component of an adaptive immune response and a second sequence comprising a second guide RNA (gRNA) that specifically binds a second target sequence within a second RNA molecule, the sequence comprising the first gRNA further comprises a first scaffold sequence that specifically binds to the first RNA binding protein. In some embodiments, the first scaffold sequence comprises a stem-loop structure. In some embodiments, the scaffold sequence comprises or consists of 90 nucleotides. In some embodiments, the scaffold sequence comprises or consists of 93 nucleotides. In some embodiments, the scaffold sequence comprises the sequence

(SEQ ID NO: 12)
GUUUAAGAGCUAUGCUGGAAACAGCAUAGCAAGUUUAAAUAAGGCUAGUC
CGUUAUCAACUUGAAAAAGUGGCACCGAGUCGGUGCUUUUUUU
or
(SEQ ID NO: 13)
GUUUUAGAGCUAGAAAUAGCAAGUUAAAAUAAGGCUAGUCCGUUAUCAAC
UUGAAAAAGUGGCACCGAGUCGGUGCUUUUUUU.

[0017] In some embodiments of the compositions of the disclosure, including those wherein the composition comprises a first sequence comprising a first guide RNA (gRNA) that specifically binds a first target sequence within a first RNA molecule, wherein the first target sequence comprises a sequence encoding a component of an adaptive immune response and a second sequence comprising a second guide RNA (gRNA) that specifically binds a second target sequence within a second RNA molecule, the sequence comprising the second gRNA further comprises a second spacer sequence that specifically binds to the second target RNA sequence. In some embodiments, the second spacer sequence has at least 50%, 55%, 60%, 65%, 70%, 75%, 80%, 87%, 90%, 95%, 97%, 99% or any percentage in between of complementarity to the first target RNA sequence. In some embodiments, the second spacer sequence has 100% complementarity to the target RNA sequence. In some embodiments, the second spacer sequence comprises or consists of 20 nucleotides. In some embodiments, the second spacer sequence comprises or consists of 21 nucleotides. In some embodiments, the second spacer sequence comprises or further comprises a sequence comprising at least 1, 2, 3, 4, 5, 6, or 7 repeats of the sequence CUG (SEQ ID NO: 18), CCUG (SEQ ID NO: 19), CAG (SEQ ID NO: 80), GGGGCC (SEQ ID NO: 81) or any combination thereof.

[0018] In some embodiments of the compositions of the disclosure, including those wherein the composition comprises a first sequence comprising a first guide RNA (gRNA) that specifically binds a first target sequence within a first RNA molecule, wherein the first target sequence comprises a sequence encoding a component of an adaptive immune response and a second sequence comprising a second guide RNA (gRNA) that specifically binds a second target sequence within a second RNA molecule, the sequence comprising the second gRNA further comprises a second scaffold sequence that specifically binds to the first RNA binding protein. In some embodiments, the second scaffold sequence comprises a stem-loop structure. In some embodiments, the scaffold sequence comprises or consists of 85 nucleotides. In some embodiments, the scaffold sequence comprises the sequence

(SEQ ID NO: 12)
GUUUAAGAGCUAUGCUGGAAACAGCAUAGCAAGUUUAAAUAAGGCUAGU
CCGUUAUCAACUUGAAAAAGUGGCACCGAGUCGGUGCUUUUUUU
or
(SEQ ID NO: 13)
GUUUUAGAGCUAGAAAUAGCAAGUUAAAAUAAGGCUAGUCCGUUAUCAA
CUUGAAAAAGUGGCACCGAGUCGGUGCUUUUUUU.

[0019] In some embodiments of the compositions of the disclosure, the gRNA does not bind or does not selectively bind to a second sequence within the RNA molecule.

[0020] In some embodiments of the compositions of the disclosure, including those wherein the composition comprises a first sequence comprising a first guide RNA (gRNA) that specifically binds a first target sequence within a first RNA molecule, wherein the first target sequence comprises a sequence encoding a component of an adaptive immune response and a second sequence comprising a second guide RNA (gRNA) that specifically binds a second target sequence within a second RNA molecule, the first gRNA does not bind or does not selectively bind to a second sequence within the first RNA molecule.

[0021] In some embodiments of the compositions of the disclosure, including those wherein the composition comprises a first sequence comprising a first guide RNA (gRNA) that specifically binds a first target sequence within a first RNA molecule, wherein the first target sequence comprises a sequence encoding a component of an adaptive immune response and a second sequence comprising a second guide RNA (gRNA) that specifically binds a second target sequence within a second RNA molecule, the second gRNA does not bind or does not selectively bind to a second sequence within the second RNA molecule.

[0022] In some embodiments of the compositions of the disclosure, an RNA genome or an RNA transcriptome comprises the RNA molecule.

[0023] In some embodiments of the compositions of the disclosure, including those wherein the composition comprises a first sequence comprising a first guide RNA (gRNA) that specifically binds a first target sequence within a first RNA molecule, wherein the first target sequence comprises a sequence encoding a component of an adaptive immune response and a second sequence comprising a second guide RNA (gRNA) that specifically binds a second target sequence within a second RNA molecule, an RNA genome or an RNA transcriptome comprises the first RNA molecule or the second RNA molecule.

[0024] In some embodiments of the compositions of the disclosure, including those wherein the composition comprises a first sequence comprising a first guide RNA (gRNA) that specifically binds a first target sequence within a first RNA molecule, wherein the first target sequence comprises a sequence encoding a component of an adaptive immune response and a second sequence comprising a second guide RNA (gRNA) that specifically binds a second target sequence within a second RNA molecule, the first RNA binding protein comprises a CRISPR-Cas protein. In some embodiments, the CRISPR-Cas protein is a Type II CRISPR-Cas protein. In some embodiments, the first RNA binding protein comprises a Cas9 polypeptide or an RNA-binding portion thereof. In some embodiments, the CRISPR-Cas protein is a Type V CRISPR-Cas protein. In some embodiments, the first RNA binding protein comprises a Cpf1 polypeptide or an RNA-binding portion thereof. In some embodiments, the CRISPR-Cas protein is a Type VI CRISPR-Cas protein. In some embodiments, the first RNA binding protein comprises a Cas13 polypeptide or an RNA-binding portion thereof. In some embodiments, the CRISPR-Cas protein comprises a native RNA nuclease activity. In some embodiments, the native RNA nuclease activity is reduced or inhibited. In some embodiments, the native RNA nuclease activity is increased or induced. In some embodiments, the CRISPR-Cas protein comprises a native DNA nuclease activity and wherein the native DNA nuclease activity is inhibited. In some embodiments, the CRISPR-Cas protein comprises a mutation. In some embodiments, a nuclease domain of the CRISPR-Cas protein comprises the mutation. In some embodiments, the mutation occurs in a nucleic acid encoding the CRISPR-Cas protein. In some embodiments, the mutation occurs in an amino acid encoding the CRISPR-Cas protein. In some embodiments, the mutation comprises a substitution, an insertion, a deletion, a frameshift, an inversion, or a transposition. In some embodiments, the mutation comprises a deletion of a nuclease domain, a binding site within the nuclease domain, an active site within the nuclease domain, or at least one essential amino acid residue within the nuclease domain.

[0025] In some embodiments of the compositions of the disclosure, including those wherein the composition comprises a first sequence comprising a first guide RNA (gRNA) that specifically binds a first target sequence within a first RNA molecule, wherein the first target sequence comprises a sequence encoding a component of an adaptive immune response and a second sequence comprising a second guide RNA (gRNA) that specifically binds a second target sequence within a second RNA molecule, the first RNA binding protein comprises a Pumilio and FBF (PUF) protein or an RNA binding portion thereof. In some embodiments, the first RNA binding protein comprises a Pumilio-based assembly (PUMBY) protein or an RNA binding portion thereof.

[0026] In some embodiments of the compositions of the disclosure, including those wherein the composition comprises a first sequence comprising a first guide RNA (gRNA) that specifically binds a first target sequence within a first RNA molecule, wherein the first target sequence comprises a sequence encoding a component of an adaptive immune response and a second sequence comprising a second guide RNA (gRNA) that specifically binds a second target sequence within a second RNA molecule, the first RNA binding protein does not require multimerization for RNA-binding activity. In some embodiments, the first RNA binding protein is not a monomer of a multimer complex. In some embodiments, a multimer protein complex does not comprise the first RNA binding protein.

[0027] In some embodiments of the compositions of the disclosure, including those wherein the composition comprises a first sequence comprising a first guide RNA (gRNA) that specifically binds a first target sequence within a first RNA molecule, wherein the first target sequence comprises a sequence encoding a component of an adaptive immune response and a second sequence comprising a second guide RNA (gRNA) that specifically binds a second target sequence within a second RNA molecule, the first RNA binding protein selectively binds to a target sequence within the RNA molecule. In some embodiments, the first RNA binding protein does not comprise an affinity for a second sequence within the RNA molecule. In some embodiments, the first RNA binding protein does not comprise a high affinity for or selectively bind a second sequence within the RNA molecule. In some embodiments, an RNA genome or an RNA transcriptome comprises the RNA molecule.

[0028] In some embodiments of the compositions of the disclosure, including those wherein the composition comprises a first sequence comprising a first guide RNA (gRNA) that specifically binds a first target sequence within a first RNA molecule, wherein the first target sequence comprises a sequence encoding a component of an adaptive immune response and a second sequence comprising a second guide RNA (gRNA) that specifically binds a second target sequence within a second RNA molecule, the first RNA binding protein comprises between 2 and 1300 amino acids, inclusive of the endpoints.

[0029] In some embodiments of the compositions of the disclosure, including those wherein the composition comprises a first sequence comprising a first guide RNA (gRNA) that specifically binds a first target sequence within a first RNA molecule, wherein the first target sequence comprises a sequence encoding a component of an adaptive immune response and a second sequence comprising a second guide RNA (gRNA) that specifically binds a second target sequence within a second RNA molecule, the sequence encoding the first RNA binding protein further comprises a sequence encoding a nuclear localization signal (NLS). In some embodiments, the sequence encoding a nuclear localization signal (NLS) is positioned 3′ to the sequence encoding the first RNA binding protein. In some embodiments, the first RNA binding protein comprises an NLS at a C-terminus of the protein.

[0030] In some embodiments of the compositions of the disclosure, including those wherein the composition comprises a first sequence comprising a first guide RNA (gRNA) that specifically binds a first target sequence within a first RNA molecule, wherein the first target sequence comprises a sequence encoding a component of an adaptive immune response and a second sequence comprising a second guide RNA (gRNA) that specifically binds a second target sequence within a second RNA molecule, the sequence encoding the first RNA binding protein further comprises a first sequence encoding a first NLS and a second sequence encoding a second NLS. In some embodiments, the sequence encoding the first NLS or the second NLS is positioned 3′ to the sequence encoding the first RNA binding protein. In some embodiments, the first RNA binding protein comprises the first NLS or the second NLS at a C-terminus of the protein.

[0031] In some embodiments of the compositions of the disclosure, including those wherein the composition comprises a first sequence comprising a first guide RNA (gRNA) that specifically binds a first target sequence within a first RNA molecule, wherein the first target sequence comprises a sequence encoding a component of an adaptive immune response and a second sequence comprising a second guide RNA (gRNA) that specifically binds a second target sequence within a second RNA molecule, the second RNA binding protein comprises or consists of a nuclease domain. In some embodiments, the second RNA binding protein comprises or consists of an RNAse. In some embodiments, the second RNA binding protein comprises or consists of an RNAse1. In some embodiments, the RNAse1 protein comprises or consists of SEQ ID NO: 20. In some embodiments, the second RNA binding protein comprises or consists of an RNAse4. In some embodiments, the RNAse4 protein comprises or consists of SEQ ID NO: 21. In some embodiments, the second RNA binding protein comprises or consists of an RNAse6. In some embodiments, the RNAse6 protein comprises or consists of SEQ ID NO: 22. In some embodiments, the second RNA binding protein comprises or consists of an RNAse7. In some embodiments, the RNAse7 protein comprises or consists of SEQ ID NO: 23. In some embodiments, the second RNA binding protein comprises or consists of an RNAse8. In some embodiments, the RNAse8 protein comprises or consists of SEQ ID NO: 24. In some embodiments, the second RNA binding protein comprises or consists of an RNAse2. In some embodiments, the RNAse2 comprises or consists of SEQ ID NO: 25. In some embodiments, the second RNA binding protein comprises or consists of an RNAse6PL. In some embodiments, the RNAse6PL protein comprises or consists of SEQ ID NO: 26. In some embodiments, the second RNA binding protein comprises or consists of an RNAseL. In some embodiments, the RNAseL protein comprises or consists of SEQ ID NO: 27. In some embodiments, the second RNA binding protein comprises or consists of an RNAseT2. In some embodiments, the RNAseT2 protein comprises or consists of SEQ ID NO: 28. In some embodiments, the second RNA binding protein comprises or consists of an RNAse11. In some embodiments, the RNAse11 protein comprises or consists of SEQ ID NO: 29. In some embodiments, the second RNA binding protein comprises or consists of an RNAseT2-like. In some embodiments, the RNAseT2-like protein comprises or consists of SEQ ID NO: 30.

[0032] In some embodiments of the compositions of the disclosure, including those wherein the composition comprises a first sequence comprising a first guide RNA (gRNA) that specifically binds a first target sequence within a first RNA molecule, wherein the first target sequence comprises a sequence encoding a component of an adaptive immune response and a second sequence comprising a second guide RNA (gRNA) that specifically binds a second target sequence within a second RNA molecule, the second RNA binding protein comprises or consists of a NOB1 polypeptide. In some embodiments, the NOB1 polypeptide comprises or consists of SEQ ID NO: 31.

[0033] In some embodiments of the compositions of the disclosure, including those wherein the composition comprises a first sequence comprising a first guide RNA (gRNA) that specifically binds a first target sequence within a first RNA molecule, wherein the first target sequence comprises a sequence encoding a component of an adaptive immune response and a second sequence comprising a second guide RNA (gRNA) that specifically binds a second target sequence within a second RNA molecule, the second RNA binding protein comprises or consists of an endonuclease. In some embodiments, the second RNA binding protein comprises or consists of an endonuclease V (ENDOV. In some embodiments, the ENDOV comprises or consists of SEQ ID NO: 32. In some embodiments, the second RNA binding protein comprises or consists of an endonuclease G (ENDOG). In some embodiments, the ENDOG comprises or consists of SEQ ID NO: 33. In some embodiments, the second RNA binding protein comprises or consists of an endonuclease D1 (ENDOD1). In some embodiments, the ENDOD1 comprises or consists of SEQ ID NO: 34.

[0034] In some embodiments of the compositions of the disclosure, including those wherein the composition comprises a first sequence comprising a first guide RNA (gRNA) that specifically binds a first target sequence within a first RNA molecule, wherein the first target sequence comprises a sequence encoding a component of an adaptive immune response and a second sequence comprising a second guide RNA (gRNA) that specifically binds a second target sequence within a second RNA molecule, the second RNA binding protein comprises or consists of a Human flap endonuclease-1 (hFEN1). In some embodiments, the hFEN1 comprises or consists of SEQ ID NO: 35.

[0035] In some embodiments of the compositions of the disclosure, including those wherein the composition comprises a first sequence comprising a first guide RNA (gRNA) that specifically binds a first target sequence within a first RNA molecule, wherein the first target sequence comprises a sequence encoding a component of an adaptive immune response and a second sequence comprising a second guide RNA (gRNA) that specifically binds a second target sequence within a second RNA molecule, the second RNA binding protein comprises or consists of a human Schlafen 14 (hSLFN14) polypeptide. In some embodiments, the hSLFN14 comprises or consists of SEQ ID NO: 36.

[0036] In some embodiments of the compositions of the disclosure, including those wherein the composition comprises a first sequence comprising a first guide RNA (gRNA) that specifically binds a first target sequence within a first RNA molecule, wherein the first target sequence comprises a sequence encoding a component of an adaptive immune response and a second sequence comprising a second guide RNA (gRNA) that specifically binds a second target sequence within a second RNA molecule, the second RNA binding protein comprises or consists of a human beta-lactamase-like protein 2 (hLACTB2) polypeptide. In some embodiments, the hLACTB2 comprises or consists of SEQ ID NO: 37.

[0037] In some embodiments of the compositions of the disclosure, including those wherein the composition comprises a first sequence comprising a first guide RNA (gRNA) that specifically binds a first target sequence within a first RNA molecule, wherein the first target sequence comprises a sequence encoding a component of an adaptive immune response and a second sequence comprising a second guide RNA (gRNA) that specifically binds a second target sequence within a second RNA molecule, the second RNA binding protein comprises or consists of an apurinic/apyrimidinic (AP) endodeoxyribonuclease (APEX2) polypeptide. In some embodiments, the APEX2 comprises or consists of SEQ ID NO: 38. In some embodiments, the APEX2 comprises or consists of SEQ ID NO: 39.

[0038] In some embodiments of the compositions of the disclosure, including those wherein the composition comprises a first sequence comprising a first guide RNA (gRNA) that specifically binds a first target sequence within a first RNA molecule, wherein the first target sequence comprises a sequence encoding a component of an adaptive immune response and a second sequence comprising a second guide RNA (gRNA) that specifically binds a second target sequence within a second RNA molecule, the second RNA binding protein comprises or consists of an angiogenin (ANG) polypeptide. In some embodiments, the ANG comprises or consists of SEQ ID NO: 40.

[0039] In some embodiments of the compositions of the disclosure, including those wherein the composition comprises a first sequence comprising a first guide RNA (gRNA) that specifically binds a first target sequence within a first RNA molecule, wherein the first target sequence comprises a sequence encoding a component of an adaptive immune response and a second sequence comprising a second guide RNA (gRNA) that specifically binds a second target sequence within a second RNA molecule, the second RNA binding protein comprises or consists of a heat responsive protein 12 (HRSP12) polypeptide. In some embodiments, the HRSP12 comprises or consists of SEQ ID NO: 41.

[0040] In some embodiments of the compositions of the disclosure, including those wherein the composition comprises a first sequence comprising a first guide RNA (gRNA) that specifically binds a first target sequence within a first RNA molecule, wherein the first target sequence comprises a sequence encoding a component of an adaptive immune response and a second sequence comprising a second guide RNA (gRNA) that specifically binds a second target sequence within a second RNA molecule, the second RNA binding protein comprises or consists of a Zinc Finger CCCH-Type Containing 12A (ZC3H12A). In some embodiments, the ZC3H12A comprises or consists of SEQ ID NO: 42. In some embodiments, the ZC3H12A comprises or consists of SEQ ID NO: 43.

[0041] In some embodiments of the compositions of the disclosure, including those wherein the composition comprises a first sequence comprising a first guide RNA (gRNA) that specifically binds a first target sequence within a first RNA molecule, wherein the first target sequence comprises a sequence encoding a component of an adaptive immune response and a second sequence comprising a second guide RNA (gRNA) that specifically binds a second target sequence within a second RNA molecule, the second RNA binding protein comprises or consists of a Reactive Intermediate Imine Deaminase A (RIDA) polypeptide. In some embodiments, the RIDA polypeptide comprises or consists of SEQ ID NO: 44.

[0042] In some embodiments of the compositions of the disclosure, including those wherein the composition comprises a first sequence comprising a first guide RNA (gRNA) that specifically binds a first target sequence within a first RNA molecule, wherein the first target sequence comprises a sequence encoding a component of an adaptive immune response and a second sequence comprising a second guide RNA (gRNA) that specifically binds a second target sequence within a second RNA molecule, the second RNA binding protein comprises or consists of a Phospholipase D Family Member 6 (PDL6) polypeptide. In some embodiments, the PDL6 polypeptide comprises or consists of SEQ ID NO: 126.

[0043] In some embodiments of the compositions of the disclosure, including those wherein the composition comprises a first sequence comprising a first guide RNA (gRNA) that specifically binds a first target sequence within a first RNA molecule, wherein the first target sequence comprises a sequence encoding a component of an adaptive immune response and a second sequence comprising a second guide RNA (gRNA) that specifically binds a second target sequence within a second RNA molecule, the second RNA binding protein comprises or consists of a Endonuclease III-like protein 1 (NTHL) polypeptide. In some embodiments, the NTHL polypeptide comprises or consists of SEQ ID NO: 123.

[0044] In some embodiments of the compositions of the disclosure, including those wherein the composition comprises a first sequence comprising a first guide RNA (gRNA) that specifically binds a first target sequence within a first RNA molecule, wherein the first target sequence comprises a sequence encoding a component of an adaptive immune response and a second sequence comprising a second guide RNA (gRNA) that specifically binds a second target sequence within a second RNA molecule, the second RNA binding protein comprises or consists of a Mitochondrial ribonuclease P catalytic subunit (KIAA0391) polypeptide. In some embodiments, the KIAA0391 polypeptide comprises or consists of SEQ ID NO: 127.

[0045] In some embodiments of the compositions of the disclosure, including those wherein the composition comprises a first sequence comprising a first guide RNA (gRNA) that specifically binds a first target sequence within a first RNA molecule, wherein the first target sequence comprises a sequence encoding a component of an adaptive immune response and a second sequence comprising a second guide RNA (gRNA) that specifically binds a second target sequence within a second RNA molecule, the second RNA binding protein comprises or consists of an apurinic or apyrimidinic site lyase (APEX1) polypeptide. In some embodiments, the APEX1 polypeptide comprises or consists of SEQ ID NO: 125.

[0046] In some embodiments of the compositions of the disclosure, including those wherein the composition comprises a first sequence comprising a first guide RNA (gRNA) that specifically binds a first target sequence within a first RNA molecule, wherein the first target sequence comprises a sequence encoding a component of an adaptive immune response and a second sequence comprising a second guide RNA (gRNA) that specifically binds a second target sequence within a second RNA molecule, the second RNA binding protein comprises or consists of an argonaute 2 (AGO2) polypeptide. In some embodiments, encoding the AGO2 polypeptide comprises or consists of SEQ ID NO: 128.

[0047] In some embodiments of the compositions of the disclosure, including those wherein the composition comprises a first sequence comprising a first guide RNA (gRNA) that specifically binds a first target sequence within a first RNA molecule, wherein the first target sequence comprises a sequence encoding a component of an adaptive immune response and a second sequence comprising a second guide RNA (gRNA) that specifically binds a second target sequence within a second RNA molecule, the second RNA binding protein comprises or consists of a mitochondrial nuclease EXOG (EXOG) polypeptide. In some embodiments, the EXOG polypeptide comprises or consists of SEQ ID NO: 129.

[0048] In some embodiments of the compositions of the disclosure, including those wherein the composition comprises a first sequence comprising a first guide RNA (gRNA) that specifically binds a first target sequence within a first RNA molecule, wherein the first target sequence comprises a sequence encoding a component of an adaptive immune response and a second sequence comprising a second guide RNA (gRNA) that specifically binds a second target sequence within a second RNA molecule, the second RNA binding protein comprises or consists of a Zinc Finger CCCH-Type Containing 12D (ZC3H12D) polypeptide. In some embodiments, the ZC3H12D polypeptide comprises or consists of SEQ ID NO: 130.

[0049] In some embodiments of the compositions of the disclosure, including those wherein the composition comprises a first sequence comprising a first guide RNA (gRNA) that specifically binds a first target sequence within a first RNA molecule, wherein the first target sequence comprises a sequence encoding a component of an adaptive immune response and a second sequence comprising a second guide RNA (gRNA) that specifically binds a second target sequence within a second RNA molecule, the second RNA binding protein comprises or consists of an endoplasmic reticulum to nucleus signaling 2 (ERN2) polypeptide. In some embodiments, the ERN2 polypeptide comprises or consists of SEQ ID NO: 131.

[0050] In some embodiments of the compositions of the disclosure, including those wherein the composition comprises a first sequence comprising a first guide RNA (gRNA) that specifically binds a first target sequence within a first RNA molecule, wherein the first target sequence comprises a sequence encoding a component of an adaptive immune response and a second sequence comprising a second guide RNA (gRNA) that specifically binds a second target sequence within a second RNA molecule, the second RNA binding protein comprises or consists of a pelota mRNA surveillance and ribosome rescue factor (PELO) polypeptide. In some embodiments, the PELO polypeptide comprises or consists of SEQ ID NO: 132.

[0051] In some embodiments of the compositions of the disclosure, including those wherein the composition comprises a first sequence comprising a first guide RNA (gRNA) that specifically binds a first target sequence within a first RNA molecule, wherein the first target sequence comprises a sequence encoding a component of an adaptive immune response and a second sequence comprising a second guide RNA (gRNA) that specifically binds a second target sequence within a second RNA molecule, the second RNA binding protein comprises or consists of a YBEY metallopeptidase (YBEY) polypeptide. In some embodiments, the YBEY polypeptide comprises or consists of SEQ ID NO: 133.

[0052] In some embodiments of the compositions of the disclosure, including those wherein the composition comprises a first sequence comprising a first guide RNA (gRNA) that specifically binds a first target sequence within a first RNA molecule, wherein the first target sequence comprises a sequence encoding a component of an adaptive immune response and a second sequence comprising a second guide RNA (gRNA) that specifically binds a second target sequence within a second RNA molecule the second RNA binding protein comprises or consists of a cleavage and polyadenylation specific factor 4 like (CPSF4L) polypeptide. In some embodiments, the CPSF4L polypeptide comprises or consists of SEQ ID NO: 134.

[0053] In some embodiments of the compositions of the disclosure, including those wherein the composition comprises a first sequence comprising a first guide RNA (gRNA) that specifically binds a first target sequence within a first RNA molecule, wherein the first target sequence comprises a sequence encoding a component of an adaptive immune response and a second sequence comprising a second guide RNA (gRNA) that specifically binds a second target sequence within a second RNA molecule, the second RNA binding protein comprises or consists of an hCG_2002731 polypeptide. In some embodiments, the hCG_2002731 polypeptide comprises or consists of SEQ ID NO: 135. In some embodiments, the sequence encoding the hCG_2002731 polypeptide comprises or consists of SEQ ID NO: 136.

[0054] In some embodiments of the compositions of the disclosure, including those wherein the composition comprises a first sequence comprising a first guide RNA (gRNA) that specifically binds a first target sequence within a first RNA molecule, wherein the first target sequence comprises a sequence encoding a component of an adaptive immune response and a second sequence comprising a second guide RNA (gRNA) that specifically binds a second target sequence within a second RNA molecule, the second RNA binding protein comprises or consists of an Excision Repair Cross-Complementation Group 1 (ERCC1) polypeptide. In some embodiments, the ERCC1 polypeptide comprises or consists of SEQ ID NO: 137.

[0055] In some embodiments of the compositions of the disclosure, including those wherein the composition comprises a first sequence comprising a first guide RNA (gRNA) that specifically binds a first target sequence within a first RNA molecule, wherein the first target sequence comprises a sequence encoding a component of an adaptive immune response and a second sequence comprising a second guide RNA (gRNA) that specifically binds a second target sequence within a second RNA molecule, the second RNA binding protein comprises or consists of a ras-related C3 botulinum toxin substrate 1 isoform (RAC1) polypeptide. In some embodiments, the RAC1 polypeptide comprises or consists of SEQ ID NO: 138.

[0056] In some embodiments of the compositions of the disclosure, including those wherein the composition comprises a first sequence comprising a first guide RNA (gRNA) that specifically binds a first target sequence within a first RNA molecule, wherein the first target sequence comprises a sequence encoding a component of an adaptive immune response and a second sequence comprising a second guide RNA (gRNA) that specifically binds a second target sequence within a second RNA molecule, the second RNA binding protein comprises or consists of a Ribonuclease A A1 (RAA1) polypeptide. In some embodiments, the RAA1 polypeptide comprises or consists of SEQ ID NO: 139.

[0057] In some embodiments of the compositions of the disclosure, including those wherein the composition comprises a first sequence comprising a first guide RNA (gRNA) that specifically binds a first target sequence within a first RNA molecule, wherein the first target sequence comprises a sequence encoding a component of an adaptive immune response and a second sequence comprising a second guide RNA (gRNA) that specifically binds a second target sequence within a second RNA molecule, the second RNA binding protein comprises or consists of a Ras Related Protein (RAB1) polypeptide. In some embodiments, the RAB1 polypeptide comprises or consists of SEQ ID NO: 140.

[0058] In some embodiments of the compositions of the disclosure, including those wherein the composition comprises a first sequence comprising a first guide RNA (gRNA) that specifically binds a first target sequence within a first RNA molecule, wherein the first target sequence comprises a sequence encoding a component of an adaptive immune response and a second sequence comprising a second guide RNA (gRNA) that specifically binds a second target sequence within a second RNA molecule, the second RNA binding protein comprises or consists of a DNA Replication Helicase/Nuclease 2 (DNA2) polypeptide. In some embodiments, the DNA2 polypeptide comprises or consists of SEQ ID NO: 141.

[0059] In some embodiments of the compositions of the disclosure, including those wherein the composition comprises a first sequence comprising a first guide RNA (gRNA) that specifically binds a first target sequence within a first RNA molecule, wherein the first target sequence comprises a sequence encoding a component of an adaptive immune response and a second sequence comprising a second guide RNA (gRNA) that specifically binds a second target sequence within a second RNA molecule, the second RNA binding protein comprises or consists of a FLJ35220 polypeptide. In some embodiments, the FLJ35220 polypeptide comprises or consists of SEQ ID NO: 142.

[0060] In some embodiments of the compositions of the disclosure, including those wherein the composition comprises a first sequence comprising a first guide RNA (gRNA) that specifically binds a first target sequence within a first RNA molecule, wherein the first target sequence comprises a sequence encoding a component of an adaptive immune response and a second sequence comprising a second guide RNA (gRNA) that specifically binds a second target sequence within a second RNA molecule, the second RNA binding protein comprises or consists of a FLJ13173 polypeptide. In some embodiments, the FLJ13173 polypeptide comprises or consists of SEQ ID NO: 143.

[0061] In some embodiments of the compositions of the disclosure, including those wherein the composition comprises a first sequence comprising a first guide RNA (gRNA) that specifically binds a first target sequence within a first RNA molecule, wherein the first target sequence comprises a sequence encoding a component of an adaptive immune response and a second sequence comprising a second guide RNA (gRNA) that specifically binds a second target sequence within a second RNA molecule the second RNA binding protein comprises or consists of a DNA repair endonuclease XPF (ERCC4) polypeptide. In some embodiments, the ERCC4 polypeptide comprises or consists of SEQ ID NO: 124.

[0062] In some embodiments of the compositions of the disclosure, including those wherein the composition comprises a first sequence comprising a first guide RNA (gRNA) that specifically binds a first target sequence within a first RNA molecule, wherein the first target sequence comprises a sequence encoding a component of an adaptive immune response and a second sequence comprising a second guide RNA (gRNA) that specifically binds a second target sequence within a second RNA molecule, the second RNA binding protein comprises or consists of a mutated Rnase1 (Rnase1(K41R)) polypeptide. In some embodiments, the Rnase1(K41R) polypeptide comprises or consists of SEQ ID NO: 116.

[0063] In some embodiments of the compositions of the disclosure, including those wherein the composition comprises a first sequence comprising a first guide RNA (gRNA) that specifically binds a first target sequence within a first RNA molecule, wherein the first target sequence comprises a sequence encoding a component of an adaptive immune response and a second sequence comprising a second guide RNA (gRNA) that specifically binds a second target sequence within a second RNA molecule, the second RNA binding protein comprises or consists of a mutated Rnase1 (Rnase1(K41R, D121E)) polypeptide. In some embodiments, the Rnase1 (Rnase1(K41R, D121E)) polypeptide comprises or consists of SEQ ID NO: 117).

[0064] In some embodiments of the compositions of the disclosure, including those wherein the composition comprises a first sequence comprising a first guide RNA (gRNA) that specifically binds a first target sequence within a first RNA molecule, wherein the first target sequence comprises a sequence encoding a component of an adaptive immune response and a second sequence comprising a second guide RNA (gRNA) that specifically binds a second target sequence within a second RNA molecule, the second RNA binding protein comprises or consists of a mutated Rnase1 (Rnase1(K41R, D121E, H119N)) polypeptide. In some embodiments, the Rnase1 (Rnase1(K41R, D121E, H119N)) polypeptide comprises or consists of SEQ ID NO: 118.

[0065] In some embodiments of the compositions of the disclosure, including those wherein the composition comprises a first sequence comprising a first guide RNA (gRNA) that specifically binds a first target sequence within a first RNA molecule, wherein the first target sequence comprises a sequence encoding a component of an adaptive immune response and a second sequence comprising a second guide RNA (gRNA) that specifically binds a second target sequence within a second RNA molecule, the second RNA binding protein comprises or consists of a mutated Rnase1 (Rnase1(H119N)) polypeptide. In some embodiments, the Rnase1 (Rnase1(H119N)) polypeptide comprises or consists of SEQ ID NO: 119.

[0066] In some embodiments of the compositions of the disclosure, including those wherein the composition comprises a first sequence comprising a first guide RNA (gRNA) that specifically binds a first target sequence within a first RNA molecule, wherein the first target sequence comprises a sequence encoding a component of an adaptive immune response and a second sequence comprising a second guide RNA (gRNA) that specifically binds a second target sequence within a second RNA molecule, the second RNA binding protein comprises or consists of a mutated Rnase1 (Rnase1(R39D, N67D, N88A, G89D, R91D, H119N)) polypeptide. In some embodiments, the Rnase1 (Rnase1(R39D, N67D, N88A, G89D, R91D, H119N)) polypeptide comprises or consists of SEQ ID NO: 120.

[0067] In some embodiments of the compositions of the disclosure, including those wherein the composition comprises a first sequence comprising a first guide RNA (gRNA) that specifically binds a first target sequence within a first RNA molecule, wherein the first target sequence comprises a sequence encoding a component of an adaptive immune response and a second sequence comprising a second guide RNA (gRNA) that specifically binds a second target sequence within a second RNA molecule, the second RNA binding protein comprises or consists of a mutated Rnase1 (Rnase1(R39D, N67D, N88A, G89D, R91D, H119N)) polypeptide. In some embodiments, the Rnase1 (Rnase1(R39D, N67D, N88A, G89D, R91D, H119N, K41R, D121E)) polypeptide comprises or consists of SEQ ID NO: 121.

[0068] In some embodiments of the compositions of the disclosure, including those wherein the composition comprises a first sequence comprising a first guide RNA (gRNA) that specifically binds a first target sequence within a first RNA molecule, wherein the first target sequence comprises a sequence encoding a component of an adaptive immune response and a second sequence comprising a second guide RNA (gRNA) that specifically binds a second target sequence within a second RNA molecule, the second RNA binding protein comprises or consists of a mutated Rnase1 (Rnase1(R39D, N67D, N88A, G89D, R91D, H119N)) polypeptide. In some embodiments, the Rnase1 (Rnase1(R39D, N67D, N88A, G89D, R91D)) polypeptide comprises or consists of SEQ ID NO: 122.

[0069] In some embodiments of the compositions of the disclosure, including those wherein the composition comprises a first sequence comprising a first guide RNA (gRNA) that specifically binds a first target sequence within a first RNA molecule, wherein the first target sequence comprises a sequence encoding a component of an adaptive immune response and a second sequence comprising a second guide RNA (gRNA) that specifically binds a second target sequence within a second RNA molecule, the second RNA binding protein comprises or consists of a Teneurin Transmembrane Protein 1 (TENM1) polypeptide. In some embodiments, the TENM1 polypeptide comprises or consists of SEQ ID NO: 144.

[0070] In some embodiments of the compositions of the disclosure, including those wherein the composition comprises a first sequence comprising a first guide RNA (gRNA) that specifically binds a first target sequence within a first RNA molecule, wherein the first target sequence comprises a sequence encoding a component of an adaptive immune response and a second sequence comprising a second guide RNA (gRNA) that specifically binds a second target sequence within a second RNA molecule, the second RNA binding protein comprises or consists of a Teneurin Transmembrane Protein 1 (TENM2) polypeptide. In some embodiments, the TENM2 polypeptide comprises or consists of SEQ ID NO: 145.

[0071] In some embodiments of the compositions of the disclosure, including those wherein the composition comprises a first sequence comprising a first guide RNA (gRNA) that specifically binds a first target sequence within a first RNA molecule, wherein the first target sequence comprises a sequence encoding a component of an adaptive immune response and a second sequence comprising a second guide RNA (gRNA) that specifically binds a second target sequence within a second RNA molecule, the second RNA binding protein comprises or consists of a Ribonuclease Kappa (RNAseK) polypeptide. In some embodiments, the RNAseK protein comprises or consists of SEQ ID NO: 204.

[0072] In some embodiments of the compositions of the disclosure, including those wherein the composition comprises a first sequence comprising a first guide RNA (gRNA) that specifically binds a first target sequence within a first RNA molecule, wherein the first target sequence comprises a sequence encoding a component of an adaptive immune response and a second sequence comprising a second guide RNA (gRNA) that specifically binds a second target sequence within a second RNA molecule, the second RNA binding protein comprises or consists of a transcription activator-like effector nuclease (TALEN) polypeptide or a nuclease domain thereof. In some embodiments, the TALEN polypeptide comprises or consists of:

| (SEQ ID NO: 205) | |
|---|---|
| 1 | MRIGKSSGWL NESVSLEYEH VSPPTRPRDT RRRPRAAGDG GLAHLHRRLA VGYAEDTPRT |
| 61 | EARSPAPRRP LPVAPASAPP APSLVPEPPM PVSLPAVSSP RFSAGSSAAI TDPFPSLPPT |
| 121 | PVLYAMAREL EALSDATWQP AVPLPAEPPT DARRGNTVFD EASASSPVIA SACPQAFASP |
| 181 | PRAPRSARAR RARTGGDAWP APTFLSRPSS SRIGRDVFGK LVALGYSREQ IRKLKQESLS |
| 241 | EIAKYHTTLT GQGFTHADIC RISRRRQSLR VVARNYPELA AALPELTRAH IVDIARQRSG |
| 301 | DLALQALLPV ATALTAAPLR LSASQIATVA QYGERPAIQA LYRLRRKLTR APLHLTPQQV |
| 361 | VAIASNTGGK RALEAVCVQL PVLRAAPYRL STEQVVAIAS NKGGKQALEA VKAHLLDLLG |
| 421 | APYVLDTEQV VAIASHNGGK QALEAVKADL LDLRGAPYAL STEQVVAIAS HNGGKQALEA |
| 481 | VKADLLELRG APYALSTEQV VAIASHNGGK QALEAVKAHL LDLRGVPYAL STEQVVAIAS |
| 541 | HNGGKQALEA VKAQLLDLRG APYALSTAQV VAIASNGGGK QALEGIGEQL LKLRTAPYGL |
| 601 | STEQVVAIAS HDGGKQALEA VGAQLVALRA APYALSTEQV VAIASNKGGK QALEAVKAQL |
| 661 | LELRGAPYAL STAQVVAIAS HDGGNQALEA VGTQLVALRA APYALSTEQV VAIASHDGGK |
| 721 | QALEAVGAQL VALRAAPYAL NTEQVVAIAS SHGGKQALEA VRALFPDLRA APYALSTAQL |
| 781 | VAIASNPGGK QALEAVRALF RELRAAPYAL STEQVVAIAS NHGGKQALEA VRALFRGLRA |
| 841 | APYGLSTAQV VAIASSNGGK QALEAVWALL PVLRATPYDL NTAQIVAIAS HDGGKPALEA |
| 901 | VWAKLPVLRG APYALSTAQV VAIACISGQQ ALEAIEAHMP TLRQASHSLS PERVAAIACI |
| 961 | GGRSAVEAVR QGLPVKAIRR IRREKAPVAG PPPASLGPTP QELVAVLHFF RAHQQPRQAF |
| 1021 | VDALAAFQAT RPALLRLLSS VGVTEIEALG GTIPDATERW QRLLGRLGFR PATGAAAPSP |
| 1081 | DSLQGFAQSL ERTLGSPGMA GQSACSPHRK RPAETAIAPR SIRRSPNNAG QPSEPWPDQL |
| 1141 | AWLQRRKRTA RSHIRADSAA SVPANLHLGT RAQFTPDRLR AEPGPIMQAH TSPASVSFGS |
| 1201 | HVAFEPGLPD PGTPTSADLA SFEAEPFGVG PLDFHLDWLL QILET. |

In some embodiments, the TALEN polypeptide comprises or consists of:

| (SEQ ID NO: 206) | |
|---|---|
| 1 | mdpirsrtps parellpgpq pdrvqptadr ggappaggpl dglparrtms rtrlpsppap |
| 61 | spafsagsfs dllrqfdpsl ldtslldsmp avgtphtaaa paecdevqsg lraaddpppt |
| 121 | vrvavtaarp prakpaprrr aaqpsdaspa aqvdlrtlgy sqqqqekikp kvgstvaqhh |
| 181 | ealvghgfth ahivalsrhp aalgtvavky qdmiaalpea thedivgvgk qwsgaralea |
| 241 | lltvagelrg pplqldtgql vkiakrggvt aveavhasrn altgaplnlt paqvvaiasn |
| 301 | nggkqaletv qrllpvlcqa hgltpaqvva iashdggkqa letmqrllpv lcqahglppd |
| 361 | qvvaiasnig gkqaletvqr llpvlcqahg ltpdqvvaia shgggkqale tvqrllpvlc |
| 421 | qahgltpdqv vaiashdggk qaletvqrll pvlcqahglt pdqvvaiasn gggkqaletv |
| 481 | qrllpvlcqa hgltpdqvva iasnggkqal etvqrllpvl cqahgltpdq vvaiashdgg |
| 541 | kqaletvqrl lpvlcqthgl tpaqvvaias hdggkqalet vqqllpvlcq ahgltpdqvv |
| 601 | aiasniggkq alatvqrllp vlcqahgltp dqvvaiasng ggkqaletvq rllpvlcqah |
| 661 | gltpdqvvai asngggkqal etvqrllpvl cqahgltqvq vvaiasnigg kqaletvqrl |
| 721 | lpvlcqahgl tpaqvvaias hdggkqalet vqrllpvlcq ahgltpdqvv aiasngggkq |
| 781 | aletvqrllp vlcqahgltq eqvvaiasnn ggkqaletvq rllpvlcqah gltpdqvvai |
| 841 | asngggkqal etvqrllpvl cqahgltpaq vvaiasnigg kqaletvqrl lpvlcqdhgl |
| 901 | tlaqvvaias niggkqalet vqrllpvlcq ahgltqdqvv aiasniggkq aletvqrllp |
| 961 | vlcqdhgltp dqvvaiasni ggkqaletvq rllpvlcqdh gltldqvvai asnggkqale |
| 1021 | tvqrllpvlc qdhgltpdqv vaiasnsggk qaletvqrll pvlcqdhglt pnqvvaiasn |
| 1081 | ggkqalesiv aqlsrpdpal aaltndhlva laclggrpam davkkglpha pelirrvnrr |
| 1141 | igertshrva dyaqvvrvle ffqchshpay afdeamtqfg msrnglvqlf rrvgvtelea |
| 1201 | rggtlppasq rwdrilqasg mkrakpspts aqtpdqaslh afadslerdl dapspmhegd |
| 1261 | qtgassrkrs rsdravtgps aqhsfevrvp eqrdalhlpl swrvkrprtr iggglpdpgt |
| 1321 | piaadlaass tvmweqdaap fagaaddfpa fneeelawlm ellpqsgsvg gti. |

[0073] In some embodiments of the compositions of the disclosure, including those wherein the composition comprises a first sequence comprising a first guide RNA (gRNA) that specifically binds a first target sequence within a first RNA molecule, wherein the first target sequence comprises a sequence encoding a component of an adaptive immune response and a second sequence comprising a second guide RNA (gRNA) that specifically binds a second target sequence within a second RNA molecule, the second RNA binding protein comprises or consists of a zinc finger nuclease polypeptide or a nuclease domain thereof. In some embodiments, the second RNA binding protein comprises or consists of a ZNF638 polypeptide or a nuclease domain thereof. In some embodiments, the ZNF638 polypeptide polypeptide comprises or consists of:

| (SEQ ID NO: 207) | |
|---|---|
| 1 | MSRPRFNPRG DFPLQRPRAP NPSGMRPPGP FMRPGSMGLP RFYPAGRARG IPHRFAGHES |
| 61 | YQNMGPQRMN VQVTQHRTDP RLTKEKLDFH EAQQKKGKPH GSRWDDEPHI SASVAVKQSS |
| 121 | VTQVTEQSPK VQSRYTKESA SSILASFGLS NEDLEELSRY PDEQLTPENM PLILRDIRMR |
| 181 | KMGRRLPNLP SQSRNKETLG SEAVSSNVID YGHASKYGYT EDPLEVRIYD PEIPTDEVEN |
| 241 | EFQSQQNISA SVPNPNVICN SMFPVEDVFR QMDFPGESSN NRSFFSVESG TKMSGLHISG |
| 301 | GQSVLEPIKS VNQSINQTVS QTMSQSLIPP SMNQQPFSSE LISSVSQQER IPHEPVINSS |
| 361 | NVHVGSRGSK KNYQSQADIP IRSPFGIVKA SWLPKFSHAD AQKMKRLPTP SMMNDYYAAS |
| 421 | PRIFPHLCSL CNVECSHLKD WIQHQNTSTH IESCRQLRQQ YPDWNPEILP SRRNEGNRKE |
| 481 | NETPRRRSHS PSPRRSRRSS SSHRFRRSRS PMHYMYRPRS RSPRICHRFI SRYRSRSRSR |
| 541 | SPYRIRNPFR GSPKCFRSVS PERMSRRSVR SSDRKKALED VVQRSGHGTE FNKQKHLEAA |
| 601 | DKGHSPAQKP KTSSGTKPSV KPTSATKSDS NLGGHSIRCK SKNLEDDTLS ECKQVSDKAV |
| 661 | SLQRKLRKEQ SLHYGSVLLI TELPEDGCTE EDVRKLFQPF GKVNDVLIVP YRKEAYLEME |
| 721 | FKEAITAIMK YIETTPLTIK GKSVKICVPG KKKAQNKEVK KKTLESKKVS ASTLKRDADA |
| 781 | SKAVEIVTST SAAKTGQAKA SVAKVNKSTG KSASSVKSVV TVAVKGNKAS IKTAKSGGKK |
| 841 | SLEAKKTGNV KNKDSNKPVT IPENSEIKTS IEVKATENCA KEAISDAALE ATENEPLNKE |
| 901 | TEEMCVMLVS NLPNKGYSVE EVYDLAKPFG GLKDILILSS HKKAYIEINR KAAESMVKFY |
| 961 | TCFPVLMDGN QLSISMAPEN MNIKDEEAIF ITLVKENDPE ANIDTIYDRF VHLDNLPEDG |
| 1021 | LQCVLCVGLQ FGKVDHHVFI SNRNKAILQL DSPESAQSMY SFLKQNPQNI GDHMLTCSLS |
| 1081 | PKIDLPEVQI EHDPELEKES PGLKNSPIDE SEVQTATDSP SVKPNELEEE STPSIQTETL |
| 1141 | VQQEEPCEEE AEKATCDSDF AVETLELETQ GEEVKEEIPL VASASVSIEQ FTENAEECAL |
| 1201 | NQQMFNSDLE KKGAEIINPK TALLPSDSVF AEERNLKGIL EESPSEAEDF ISGITQTMVE |
| 1261 | AVAEVEKNET VSEILPSTCI VTLVPGIPTG DEKTVDKKNI SEKKGNMDEK EEKEFNTKET |
| 1321 | RMDLQIGTEK AEKNEGRMDA EKVEKMAAMK EKPAENTLFK AYPNKGVGQA NKPDETSKTS |
| 1381 | ILAVSDVSSS KPSIKAVIVS SPKAKATVSK TENQKSFPKS VPRDQINAEK KLSAKEFGLL |
| 1441 | KPTSARSGLA ESSSKFKPTQ SSLTRGGSGR ISALQGKLSK LDYRDITKQS QETEARPSIM |
| 1501 | KRDDSNNKTL AEQNTKNPKS TTGRSSKSKE EPLFPFNLDE FVTVDEVIEE VNPSQAKQNP |
| 1561 | LKGKRKETLK NVPFSELNLK KKKGKTSTPR GVEGELSFVT LDEIGEEEDA AAHLAQALVT |
| 1621 | VDEVIDEEEL NMEEMVKNSN SLFTLDELID QDDCISHSEP KDVTVLSVAE EQDLLKQERL |
| 1681 | VTVDEIGEVE ELPLNESADI TFATLNTKGN EGDTVRDSIG FISSQVPEDP STLVTVDEIQ |
| 1741 | DDSSDLHLVT LDEVTEEDED SLADFNNLKE ELNFVTVDEV GEEEDGDNDL KVELAQSKND |
| 1801 | HPTDKKGNRK KRAVDTKKTK LESLSQVGPV NENVMEEDLK TMIERHLTAK TPTKRVRIGK |
| 1861 | TLPSEKAVVT EPAKGEEAFQ MSEVDEESGL KDSEPERKRK KTEDSSSGKS VASDVPEELD |
| 1921 | FLVPKAGFFC PICSLFYSGE KAMTNHCKST RHKQNTEKFM AKQRKEKEQN EAEERSSR. |

[0074] In some embodiments of the compositions of the disclosure, the composition further comprises (a) a sequence comprising a gRNA that specifically binds within an RNA molecule and (b) a sequence encoding a nuclease. In some embodiments, the sequence encoding a nuclease comprises a sequence isolated or derived from a CRISPR/Cas protein. In some embodiments, the CRISPR/Cas protein is isolated or derived from any one of a type I, a type IA, a type IB, a type IC, a type ID, a type IE, a type IF, a type IU, a type III, a type IIIA, a type IIIB, a type IIIC, a type HID, a type IV, a type IVA, a type IVB, a type II, a type IIA, a type IIB, a type IIC, a type V, or a type VI CRISPR/Cas protein. In some embodiments, the sequence encoding a nuclease comprises a sequence isolated or derived from a TALEN or a nuclease domain thereof. In some embodiments, the sequence encoding a nuclease comprises a sequence isolated or derived from a zinc finger nuclease or a nuclease domain thereof. In some embodiments, the target sequence comprises a sequence encoding a component of an adaptive immune response.

[0075] The disclosure provides a vector comprising a composition of the disclosure. In some embodiments, the vector is a viral vector. In some embodiments, the vector comprises a sequence isolated or derived from a lentivirus, an adenovirus, an adeno-associated virus (AAV) vector, or a retrovirus. In some embodiments, the vector is replication incompetent.

[0076] The disclosure provides a vector comprising a composition of the disclosure. In some embodiments, the vector is a viral vector. In some embodiments, the vector comprises a sequence isolated or derived from an adeno-associated vector (AAV). In some embodiments, the adeno-associated virus (AAV) is an isolated AAV. In some embodiments, the adeno-associated virus (AAV) is a self-complementary adeno-associated virus (scAAV). In some embodiments, the adeno-associated virus (AAV) is a recombinant adeno-associated virus (rAAV). In some embodiments, the adeno-associated virus (AAV) comprises a sequence isolated or derived from an AAV of serotype AAV1, AAV2, AAV3, AAV4, AAV5, AAV6, AAV7, AAV8, AAV9, AAV10, AAV11, or AAV12. In some embodiments, the adeno-associated virus (AAV) comprises a sequence isolated or derived from an AAV of serotype AAV9. In some embodiments, the adeno-associated virus (AAV) comprise a sequence isolated or derived from Anc80.

[0077] The disclosure provides a vector comprising a composition of the disclosure. In some embodiments, the vector is a viral vector. In some embodiments, the vector is a retrovirus.

[0078] The disclosure provides a vector comprising a composition of the disclosure. In some embodiments, the vector is a viral vector. In some embodiments, the vector is a lentivirus.

[0079] The disclosure provides a vector comprising a composition of the disclosure. In some embodiments, the vector is a non-viral vector. In some embodiments, the non-viral vector comprises a nanoparticle, a micelle, a liposome or lipoplex, a polymersome, a polyplex or a dendrimer.

[0080] The disclosure provides a composition comprising a vector of the disclosure.

[0081] The disclosure provides a cell comprising a vector of the disclosure.

[0082] The disclosure provides a cell comprising a cell of the disclosure.

[0083] In some embodiments of cells of the disclosure, the cell is a mammalian cell. In some embodiments, the cell is a human cell.

[0084] In some embodiments of cells of the disclosure, the cell is an immune cell. In some embodiments, the immune cell is a T lymphocyte (T-cell). In some embodiments, the T-cell is an effector T-cell, a helper T-cell, a memory T-cell, a regulatory T-cell, a natural Killer T-cell, a mucosal-associated invariant T-cell, or a gamma delta T cell.

[0085] In some embodiments of cells of the disclosure, the cell is an immune cell. In some embodiments, the immune cell is an antigen-presenting cell. In some embodiments, the antigen-presenting cell is a dendritic cell, a macrophage, or a B cell. In some embodiments, the antigen-presenting cell is a somatic cell.

[0086] In some embodiments of cells of the disclosure, the cell is an immune cell. In some embodiments, the cell is a healthy cell. In some embodiments, the cell is not a healthy cell. In some embodiments, the cell is isolated or derived from a subject having a disease or disorder.

[0087] The disclosure provides a composition comprising a cell of the disclosure.

[0088] The disclosure provides a composition comprising a plurality of cells of the disclosure.

[0089] The disclosure provides a method of masking a cell from an adaptive immune response comprising contacting a composition of the disclosure to the cell to produce a modified cell, wherein the composition modifies a level of expression of an RNA molecule of the modified cell and wherein the RNA molecule encodes a component of an adaptive immune response. In some embodiments, the cell is in vivo, in vitro, ex vivo or in situ. In some embodiments, the cell is in vitro or ex vivo. In some embodiments, a plurality of cells comprises the cell. In some embodiments, each cell of the plurality of cells contacts the composition, thereby producing a plurality of modified cells. In some embodiments, the method further comprises administering the modified cell to a subject. In some embodiments, the method further comprises administering the plurality of modified cells to a subject. In some embodiments, the cell is autologous. In some embodiments, the cell is allogeneic. In some embodiments, the plurality of modified cells is autologous. In some embodiments, the plurality of modified cells is allogeneic. In some embodiments, the component of an adaptive immune response comprises or consists of a component of a type I major histocompatibility complex (MHC I), a type II major histocompatibility complex (MHC II), a T-cell receptor (TCR), a costimulatory molecule or a combination thereof. In some embodiments, the MHC I component comprises an α1 chain, an α2 chain, an α3 chain, or a β2M protein. In some embodiments, the component of an adaptive immune response comprises or consists of an MHC I β2M protein. In some embodiments, the MHC II component comprises an α1 chain, an α2 chain, a β1 chain, or a β2 chain. In some embodiments, the TCR component comprises an α-chain and a β-chain. In some embodiments, the costimulatory molecule comprises a Cluster of Differentiation 28 (CD28), a Cluster of Differentiation 80 (CD80), a Cluster of Differentiation 86 (CD86), an Inducible T-cell COStimulator (ICOS), or an ICOS Ligand (ICOSLG) protein. In some embodiments, a protein component of an adaptive immune response is, without limitation, Beta-2-microglobulin (β2M), Human Leukocyte Antigen A (HLA-A), Human Leukocyte Antigen B (HLA-B), Human Leukocyte Antigen C (HLA-C), Cluster of Differentiation 28 (CD28), Cluster of Differentiation 80 (CD80), Cluster of Differentiation 86 (CD86), Inducible T-cell Costimulator (ICOS), ICOS Ligand (ICOSLG), OX40L, Interleukin 12 (IL12), or CC Chemokine Receptor 7 (CCR7).

[0090] The disclosure provides a method of preventing or reducing an adaptive immune response in a subject comprising administering a therapeutically effective amount of a composition of the disclosure to the subject, wherein the composition contacts at least one cell in the subject producing a modified cell, wherein the composition modifies a level of expression of an RNA molecule of the modified cell and wherein the RNA molecule encodes a component of an adaptive immune response.

[0091] The disclosure provides a method of treating a disease or disorder in a subject comprising administering a therapeutically effective amount of a composition of the disclosure to the subject, wherein the composition contacts at least one cell in the subject producing a modified cell, wherein the composition modifies a level of expression of an RNA molecule of the modified cell and wherein the composition prevents or reduces an adaptive immune response to the modified cell.

[0092] In some embodiments of the methods of the disclosure, the component of an adaptive immune response comprises or consists of a component of a type I major histocompatibility complex (MHC I), a type II major histocompatibility complex (MHC II), a T-cell receptor (TCR), a costimulatory molecule or a combination thereof. In some embodiments, the MHC I component comprises an α1 chain, an α2 chain, an α3 chain, or a β2M protein. In some embodiments, the component of an adaptive immune response comprises or consists of an MHC I β2M protein. In some embodiments, the MHC II component comprises an α1 chain, an α2 chain, a β1 chain, or a β2 chain. In some embodiments, the TCR component comprises an α-chain and a β-chain. In some embodiments, the costimulatory molecule comprises a Cluster of Differentiation 28 (CD28), a Cluster of Differentiation 80 (CD80), a Cluster of Differentiation 86 (CD86), an Inducible T-cell COStimulator (ICOS), or an ICOS Ligand (ICOSLG) protein.

[0093] In some embodiments of the methods of treating a disease or disorder of the disclosure, the disease or disorder is a genetic disease or disorder. In some embodiments, the disease or disorder is a single gene genetic disease or disorder. In some embodiments, the disease or disorder results from microsatellite instability. In some embodiments, the microsatellite instability occurs in a DNA sequence at least 1, 2, 3, 4, 5 or 6 repeated motifs. In some embodiments, an RNA molecule comprises a transcript of the DNA sequence and wherein the composition binds to a target sequence of the RNA molecule comprising at least 1, 2, 3, 4, 5, or 6 repeated motifs.

[0094] In some embodiments of the methods of the disclosure, the composition is administered systemically. In some embodiments, the composition is administered intravenously. In some embodiments, the composition is administered by an injection or an infusion.

[0095] In some embodiments of the methods of the disclosure, the composition is administered locally. In some embodiments, the composition is administered by an intraosseous, intraocular, intracerebral, or intraspinal route. In some embodiments, the composition is administered by an injection or an infusion.

[0096] In some embodiments of the methods of the disclosure, a therapeutically effective amount of the composition is a single dose.

[0097] In some embodiments of the methods of the disclosure, the composition is non-genome integrating.

### BRIEF DESCRIPTION OF THE DRAWINGS

[0098] The patent or application file contains at least one drawing executed in color. Copies of this patent or patent application publication with color drawing(s) will be provided by the Office upon request and payment of the necessary fee.

[0099] FIG. 1A is a schematic diagram depicting an exemplary RNA Endonuclease-C. jejuni Cas9 fusion protein.

[0100] FIG. 1B is a graph depicting changes in expression levels of Zika NS5 in the presence of both E43 and E67 CjeCas9-endonuclease fusions with sgRNAs containing the various NS5-targeting spacer sequences as indicated in Table 8. Zika NS5 expression is displayed as fold change relative to the endonuclease loaded with an sgRNA containing a control (Lambda) spacer sequence.

[0101] FIG. 2A is a fluorescence microscopy image of cells transfected with CjeCas9-endonuclease fusions loaded with an sgRNA containing a Zika NS5-targeting spacer sequence.

[0102] FIG. 2B is a graph depicting changes of expression of Zika NS5 in the presence of CjeCas9-endonuclease fusions loaded with the appropriate Zika NS5-targeting sgRNA as compared to CjeCas9-endonuclease fusions loaded with a non-Zika NS5 targeting sgRNA.

[0103] FIG. 3 is a list of exemplary endonucleases for use in the compositions of the disclosure.

[0104] FIG. 4 is a schematic diagram depicting a construct encoding an exemplary RNA Endonuclease-C. jejuni Cas9 fusion protein and two gRNA molecules for modulating immune response in the context of a gene therapy. The present invention describes a means to address human disease using a CRISPR-based gene therapy or other non-self protein encoded in AAV while simultaneously altering host gene expression to prevent adaptive immune response to the non-self protein. In one embodiment, the AAV particle (left) carries a pair of guide RNAs and a CRISPR-associated (Cas) protein. The guides target a gene associated with adaptive immune response and a gene (or gene product) to promote therapeutic benefit, respectively. Upon delivery to target tissue, the immune response-targeted guide reduces expression of genes associated with antigen presentation (beta-2-microglobulin, B2M) or co-stimulation of T cells (ICOSLG, CD80, CD86, OX40L, IL12, CCR7). Antigen presentation inhibition prevents formation of T helper (Th) cells specific to the therapeutic transgenes such as Cas proteins while co-stimulation inhibition prevents the activation of Th cells that are specific to the transgene.

### DETAILED DESCRIPTION

[0105] The disclosure provides compositions and methods for the simultaneous treatment of disease by targeting RNA molecules of a modified cell while masking the modified cell from an adaptive immune response. By inhibiting or reducing expression of a component of an adaptive immune response in the modified cell, the modified cell is invisible to a host immune system. For example, compositions of the disclosure may simultaneously target an RNA molecule associated with a genetic disease or disorder and an RNA molecule that encodes the β2M subunit of the MHC I. By selectively targeting an RNA molecule that encodes the β2M subunit of the MHC I, the composition prevents the modified cell from displaying one or more antigen peptides derived from an RNA targeting construct, vector, or combination thereof on the surface of the modified cell. Consequently, a subject's immune system does not identify the modified cell as containing foreign sequences and does not attempt to mount an immune response directed at the modified cell. This method increases the therapeutic efficacy of the treatment of the genetic disease or disorder while avoiding a common side effect of gene therapy.

### RNA-Targeting Fusion Protein Compositions

[0106] The disclosure provides a composition comprising (a) a sequence comprising a guide RNA (gRNA) that specifically binds a target sequence within an RNA molecule and (b) a sequence encoding a fusion protein, the sequence comprising a sequence encoding a first RNA-binding polypeptide and a sequence encoding a second RNA-binding polypeptide, wherein neither the first RNA-binding polypeptide nor the second RNA-binding polypeptide comprises a significant DNA-nuclease activity, wherein the first RNA-binding polypeptide and the second RNA-binding polypeptide are not identical, and wherein the second RNA-binding polypeptide comprises an RNA-nuclease activity wherein the first RNA-binding polypeptide and the second RNA-binding polypeptide are not identical, and wherein the second RNA-binding polypeptide comprises an RNA-nuclease activity.

[0107] In some embodiments of the compositions of the disclosure, the target sequence comprises at least one repeated sequence.

[0108] In some embodiments of the compositions of the disclosure, the gRNA sequence comprises a promoter capable of expressing the gRNA in a eukaryotic cell.

[0109] In some embodiments of the compositions of the disclosure, the eukaryotic cell is an animal cell. In some embodiments, the animal cell is a mammalian cell. In some embodiments, the animal cell is a human cell.

[0110] In some embodiments of the compositions of the disclosure, the promoter is a constitutively active promoter. In some embodiments, the promoter sequence is isolated or derived from a promoter capable of driving expression of an RNA polymerase. In some embodiments, the promoter sequence is isolated or derived from a U6 promoter. In some embodiments, the promoter sequence is isolated or derived from a promoter capable of driving expression of a transfer RNA (tRNA). In some embodiments, the promoter sequence is isolated or derived from an alanine tRNA promoter, an arginine tRNA promoter, an asparagine tRNA promoter, an aspartic acid tRNA promoter, a cysteine tRNA promoter, a glutamine tRNA promoter, a glutamic acid tRNA promoter, a glycine tRNA promoter, a histidine tRNA promoter, an isoleucine tRNA promoter, a leucine tRNA promoter, a lysine tRNA promoter, a methionine tRNA promoter, a phenylalanine tRNA promoter, a proline tRNA promoter, a serine tRNA promoter, a threonine tRNA promoter, a tryptophan tRNA promoter, a tyrosine tRNA promoter, or a valine tRNA promoter. In some embodiments, the promoter sequence is isolated or derived from a valine tRNA promoter.

[0111] In some embodiments of the compositions of the disclosure, the sequence comprising the gRNA further comprises a spacer sequence that specifically binds to the target RNA sequence. In some embodiments, the spacer sequence has at least 50%, 55%, 60%, 65%, 70%, 75%, 80%, 87%, 90%, 95%, 97%, 99% or any percentage in between of complementarity to the target RNA sequence. In some embodiments, the spacer sequence has 100% complementarity to the target RNA sequence. In some embodiments, the spacer sequence comprises or consists of 20 nucleotides. In some embodiments, the spacer sequence comprises or consists of 21 nucleotides. In some embodiments, the spacer sequence comprises or consists of the sequence

(SEQ ID NO: 1)

UGGAGCGAGCAUCCCCCAAA,

(SEQ ID NO: 2)

GUUUGGGGGAUGCUCGCUCCA,

(SEQ ID NO: 3)

CCCUCACUGCUGGGGAGUCC,

(SEQ ID NO: 4)

GGACUCCCCAGCAGUGAGGG,

(SEQ ID NO: 5)

GCAACUGGAUCAAUUUGCUG,

(SEQ ID NO: 6)

GCAGCAAAUUGAUCCAGUUGC,

(SEQ ID NO: 7)

GCAUUCUUAUCUGGUCAGUGC,

(SEQ ID NO: 8)

GCACUGACCAGAUAAGAAUG,

(SEQ ID NO: 9)

GAGCAGCAGCAGCAGCAGCAG,

(SEQ ID NO: 10)

GCAGGCAGGCAGGCAGGCAGG,

(SEQ ID NO: 11)

GCCCCGGCCCCGGCCCCGGC,
or

(SEQ ID NO: 84)

GCTGCTGCTGCTGCTGCTGC,

(SEQ ID NO: 74)

GGGGCCGGGGCCGGGGCCGG,

(SEQ ID NO: 75)

GGGCCGGGGCCGGGGCCGGG,

(SEQ ID NO: 76)

GGCCGGGGCCGGGGCCGGGG,

(SEQ ID NO: 77)

GCCGGGGCCGGGGCCGGGGC,

(SEQ ID NO: 78)

CCGGGGCCGGGGCCGGGGCC,
or

(SEQ ID NO: 79)

CGGGGCCGGGGCCGGGGCCG.

[0112] In some embodiments of the compositions of the disclosure, the sequence comprising the gRNA further comprises a spacer sequence that specifically binds to the target RNA sequence. In some embodiments, the spacer sequence has at least 50%, 55%, 60%, 65%, 70%, 75%, 80%, 87%, 90%, 95%, 97%, 99% or any percentage in between of complementarity to the target RNA sequence. In some embodiments, the spacer sequence has 100% complementarity to the target RNA sequence. In some embodiments, the spacer sequence comprises or consists of 20 nucleotides. In some embodiments, the spacer sequence comprises or consists of 21 nucleotides. In some embodiments, the spacer sequence comprises or consists of the sequence

(SEQ ID NO: 14)

GUGAUAAGUGGAAUGCCAUG,

(SEQ ID NO: 15)

CUGGUGAACUUCCGAUAGUG,
or

(SEQ ID NO: 16)

GAGATATAGCCTGGTGGTTC.

[0113] In some embodiments of the compositions of the disclosure, the sequence comprising the gRNA further comprises a spacer sequence that specifically binds to the target RNA sequence. In some embodiments, the spacer sequence has at least 50%, 55%, 60%, 65%, 70%, 75%, 80%, 87%, 90%, 95%, 97%, 99% or any percentage in between of complementarity to the target RNA sequence. In some embodiments, the spacer sequence has 100% complementarity to the target RNA sequence. In some embodiments, the spacer sequence comprises or consists of 20 nucleotides. In some embodiments, the spacer sequence comprises or consists of 21 nucleotides. In some embodiments, the spacer sequence comprises or consists of a sequence comprising at least 1, 2, 3, 4, 5, 6, or 7 repeats of the sequence CUG (SEQ ID NO: 18), CCUG (SEQ ID NO: 19), CAG (SEQ ID NO: 80), GGGGCC (SEQ ID NO: 81) or any combination thereof.

[0114] In some embodiments of the compositions of the disclosure, the sequence comprising the gRNA further comprises a scaffold sequence that specifically binds to the first RNA binding protein. In some embodiments, the scaffold sequence comprises a stem-loop structure. In some embodiments, the scaffold sequence comprises or consists of 90 nucleotides. In some embodiments, the scaffold sequence comprises or consists of 93 nucleotides. In some embodiments, the scaffold sequence comprises or consists of the sequence GUUUAAGAGCUAUGCUGGAAACAGCAUAGCAAGUUUAAAUAAGGCUAGUCCGUU AUCAACUUGAAAAAGUGGCACCGAGUCGGUGCUUUUUUU (SEQ ID NO: 83). In some embodiments, the scaffold sequence comprises or consists of the sequence GGACAGCAUAGCAAGUUAAAAUAAGGCUAGUCCGUUAUCAACUUGAAAAAGUGG CACCGAGUCGGUGCUUUUU (SEQ ID NO: 17). In some embodiments, the scaffold sequence comprises or consists of the sequence

(SEQ ID NO: 82)
GUUUAAGAGCUAUGCUGGAAACAGCAUAGCAAGUUUAAAUAAGGCUAGUC
CGUUAUCAACUUGAAAAAGUGGCACCGAGUCGGUGCUUUUUUU
or
(SEQ ID NO: 13)
GUUUUAGAGCUAGAAAUAGCAAGUUAAAAUAAGGCUAGUCCGUUAUCAAC
UUGAAAAAGUGGCACCGAGUCGGUGCUUUUUUU.

[0115] In some embodiments of the compositions of the disclosure, the gRNA does not bind or does not selectively bind to a second sequence within the RNA molecule.

[0116] In some embodiments of the compositions of the disclosure, an RNA genome or an RNA transcriptome comprises the RNA molecule.

[0117] In some embodiments of the compositions of the disclosure, the first RNA binding protein comprises a CRISPR-Cas protein. In some embodiments, the CRISPR-Cas protein is a Type II CRISPR-Cas protein. In some embodiments, the first RNA binding protein comprises a Cas9 polypeptide or an RNA-binding portion thereof. In some embodiments, the CRISPR-Cas protein comprises a native RNA nuclease activity. In some embodiments, the native RNA nuclease activity is reduced or inhibited. In some embodiments, the native RNA nuclease activity is increased or induced. In some embodiments, the CRISPR-Cas protein comprises a native DNA nuclease activity and the native DNA nuclease activity is inhibited. In some embodiments, the CRISPR-Cas protein comprises a mutation. In some embodiments, a nuclease domain of the CRISPR-Cas protein comprises the mutation. In some embodiments, the mutation occurs in a nucleic acid encoding the CRISPR-Cas protein. In some embodiments, the mutation occurs in an amino acid encoding the CRISPR-Cas protein. In some embodiments, the mutation comprises a substitution, an insertion, a deletion, a frameshift, an inversion, or a transposition. In some embodiments, the mutation comprises a deletion of a nuclease domain, a binding site within the nuclease domain, an active site within the nuclease domain, or at least one essential amino acid residue within the nuclease domain.

[0118] In some embodiments of the compositions of the disclosure, the first RNA binding protein comprises a CRISPR-Cas protein. In some embodiments, the CRISPR-Cas protein is a Type V CRISPR-Cas protein. In some embodiments, the first RNA binding protein comprises a Cpf1 polypeptide or an RNA-binding portion thereof. In some embodiments, the CRISPR-Cas protein comprises a native RNA nuclease activity. In some embodiments, the native RNA nuclease activity is reduced or inhibited. In some embodiments, the native RNA nuclease activity is increased or induced. In some embodiments, the CRISPR-Cas protein comprises a native DNA nuclease activity and the native DNA nuclease activity is inhibited. In some embodiments, the CRISPR-Cas protein comprises a mutation. In some embodiments, a nuclease domain of the CRISPR-Cas protein comprises the mutation. In some embodiments, the mutation occurs in a nucleic acid encoding the CRISPR-Cas protein. In some embodiments, the mutation occurs in an amino acid encoding the CRISPR-Cas protein. In some embodiments, the mutation comprises a substitution, an insertion, a deletion, a frameshift, an inversion, or a transposition. In some embodiments, the mutation comprises a deletion of a nuclease domain, a binding site within the nuclease domain, an active site within the nuclease domain, or at least one essential amino acid residue within the nuclease domain.

[0119] In some embodiments of the compositions of the disclosure, the first RNA binding protein comprises a CRISPR-Cas protein. In some embodiments, the CRISPR-Cas protein is a Type VI CRISPR-Cas protein. In some embodiments, the first RNA binding protein comprises a Cas13 polypeptide or an RNA-binding portion thereof. In some embodiments, the first RNA binding protein comprises a Cas13d polypeptide or an RNA-binding portion thereof. In some embodiments, the CRISPR-Cas protein comprises a native RNA nuclease activity. In some embodiments, the native RNA nuclease activity is reduced or inhibited. In some embodiments, the native RNA nuclease activity is increased or induced. In some embodiments, the CRISPR-Cas protein comprises a native DNA nuclease activity and the native DNA nuclease activity is inhibited. In some embodiments, the CRISPR-Cas protein comprises a mutation. In some embodiments, a nuclease domain of the CRISPR-Cas protein comprises the mutation. In some embodiments, the mutation occurs in a nucleic acid encoding the CRISPR-Cas protein. In some embodiments, the mutation occurs in an amino acid encoding the CRISPR-Cas protein. In some embodiments, the mutation comprises a substitution, an insertion, a deletion, a frameshift, an inversion, or a transposition. In some embodiments, the mutation comprises a deletion of a nuclease domain, a binding site within the nuclease domain, an active site within the nuclease domain, or at least one essential amino acid residue within the nuclease domain.

[0120] In some embodiments of the compositions of the disclosure, the first RNA binding protein comprises a Pumilio and FBF (PUF) protein. In some embodiments, the first RNA binding protein comprises a Pumilio-based assembly (PUMBY) protein. In some embodiments, a PUF1 protein of the disclosure comprises or consists of the amino acid sequence of

| (SEQ ID NO: 208) | |
|---|---|
| MDKSKQMNIN NLSNIPEVID PGITIPIYEE EYENNGESNS QLQQQPQKLG SYRSRAGKFS | 60 |
| NTLSNLLPSI SAKLHHSKKN SHGKNGAEFS SSNNSSQSTV ASKTPRASPS RSKMMESSID | 120 |
| GVTMDRPGSL TPPQDMEKLV HFPDSSNNFL IPAPRGSSDS FNLPHQISRT RNNTMSSQIT | 180 |
| SISSIAPKPR TSSGIWSSNA SANDPMQQHL LQQLQPTTSN NTTNSNTLND YSTKTAYFDN | 240 |
| MVSTSGSQMA DNKMNTNNLA IPNSVWSNTR QRSQSNASSI YTDAPLYEQP ARASISSHYT | 300 |
| IPTQESPLIA DEIDPQSINW VTMDPTVPSI NQISNLLPTN TISISNVFPL QHQQPQLNNA | 360 |
| INLTSTSLAT LCSKYGEVIS ARTLRNLNMA LVEFSSVESA VKALDSLQGK EVSMIGAPSK | 420 |
| ISFAKILPMH QQPPQFLLNS QGLPLGLENN NLQPQPLLQE QLFNGAVTFQ QQGNVSIPVF | 480 |
| NQQSQQSQHQ NHSSGSAGFS NVLHGYNNNN SMHGNNNNSA NEKEQCPFPL PPPNVNEKED | 540 |
| LLREIIELFE ANSDEYQINS LIKKSLNHKG TSDTQNFGPL PEPLSGREFD PPKLRELRKS | 600 |
| IDSNAFSDLE IEQLAIAMLD ELPELSSDYL GNTIVQKLFE HSSDIIKDIM LRKTSKYLTS | 660 |
| MGVHKNGTWA CQKMITMAHT PRQIMQVTQG VKDYCTPLIN DQFGNYVIQC VLKFGFPWNQ | 720 |
| FIFESIIANF WVIVQNRYGA RAVRACLEAH DIVTPEQSIV LSAMIVTYAE YLSTNSNGAL | 780 |
| LVTWFLDTSV LPNRHSILAP RLTKRIVELC GHRLASLTIL KVLNYRGDDN ARKIILDSLF | 840 |
| GNVNAHDSSP PKELTKLLCE TNYGPTFVHK VLAMPLLEDD LRAHIIKQVR KVLTDSTQIQ | 900 |
| PSRRLLEEVG LASPSSTHNK TKQQQQQHHN SSISHMFATP DTSGQHMRGL SVSSVKSGGS | 960 |
| KHTTMNTTTT NGSSASTLSP GQPLNANSNS SMGYFSYPGV FPVSGFSGNA SNGYAMNNDD | 1020 |
| LSSQFDMLNF NNGTRLSLPQ LSLTNHNNTT MELVNNVGSS QPHTNNNNNN NNTNYNDDNT | 1080 |
| VFETLTLHSA N. | 1091 |

In some embodiments, a PUF3 protein of the disclosure comprises or consists of the amino acid sequence of

| (SEQ ID NO: 209) | |
|---|---|
| 1 | MEMNMDMDMD MELASIVSSL SALSHSNNNG GQAAAAGIVN GGAAGSQQIG GFRRSSFTTA |
| 61 | NEVDSEILLL HGSSESSPIF KKTALSVGTA PPFSTNSKKF FGNGGNYYQY RSTDTASLSS |
| 121 | ASYNNYHTHH TAANLGKNNK VNHLLGQYSA SIAGPVYYNG NDNNNSGGEG FFEKFGKSLI |
| 181 | DGTRELESQD RPDAVNTQSQ FISKSVSNAS LDTQNTFEQN VESDKNFNKL NRNTTNSGSL |
| 241 | YHSSSNSGSS ASLESENAHY PKRNIWNVAN TPVFRPSNNP AAVGATNVAL PNQQDGPANN |
| 301 | NFPPYMNGFP PNQFHQGPHY QNFPNYLIGS PSNFISQMIS VQIPANEDTE DSNGKKKKKA |
| 361 | NRPSSVSSPS SPPNNSPFPF AYPNPMMFMP PPPLSAPQQQ QQQQQQQQQE DQQQQQQQEN |
| 421 | PYIYYPTPNP IPVKMPKDEK TFKKRNNKNH PANNSNNANK QANPYLENSI PTKNTSKKNA |
| 481 | SSKSNESTAN NHKSHSHSHP HSQSLQQQQQ TYHRSPLLEQ LRNSSSDKNS NSNMSLKDIF |
| 541 | GHSLEFCKDQ HGSRFIQREL ATSPASEKEV IFNEIRDDAI ELSNDVFGNY VIQKFFEFGS |
| 601 | KIQKNTLVDQ FKGNMKQLSL QMYACRVIQK ALEYIDSNQR IELVLELSDS VLQMIKDQNG |
| 661 | NHVIQKAIET IPIEKLPFIL SSLTGHIYHL STHSYGCRVI QRLLEFGSSE DQESILNELK |
| 721 | DFIPYLIQDQ YGNYVIQYVL QQDQFTNKEM VDIKQEIIET VANNVVEYSK HKFASNVVEK |
| 781 | SILYGSKNQK DLIISKILPR DKNHALNLED DSPMILMIKD QFANYVIQKL VNVSEGEGKK |
| 841 | LIVIAIRAYL DKLNKSNSLG NRHLASVEKL AALVENAEV. |

In some embodiments, a PUF4 protein of the disclosure comprises or consists of the amino acid sequence of

| (SEQ ID NO: 210) | |
|---|---|
| 1 | MSTKGLKEEI DDVPSVDPVV SETVNSALFQ LQLDDPEENA TSNAFANKVS QDSQFANGPP |
| 61 | SQMFPHPQMM GGMGFMPYSQ MMQVPHNPCP FFPPPDFNDP TAPLSSSPLN AGGPPMLFKN |
| 121 | DSLPFQMLSS GAAVATQGGQ NLNPLINDNS MKVLPIASAD PLWTHSNVPG SASVAIEETT |
| 181 | ATLQESLPSK GRESNNKASS FRRQTFHALS PTDLINAANN VTLSKDFQSD MQNFSKAKKP |
| 241 | SVGANNTAKT RTQSISFDNT PSSTSFIPPT NSVSEKLSDF KIETSKEDLI NKTAPAKKES |
| 301 | PTTYGAAYPY GGPLLQPNPI MPGHPHNISS PIYGIRSPFP NSYEMGAQFQ PFSPILNPTS |
| 361 | HSLNANSPIP LTQSPIHLAP VLNPSSNSVA FSDMKNDGGK PTTDNDKAGP NVRMDLINPN |
| 421 | LGPSMQPFHI LPPQQNTPPP PWLYSTPPPF NAMVPPHLLA QNHMPLMNSA NNKHHGRNNN |
| 481 | SMSSHNDNDN IGNSNYNNKD TGRSNVGKMK NMKNSYHGYY NNNNNNNNNN NNNNNSNATN |
| 541 | SNSAEKQRKI EESSRFADAV LDQYIGSIHS LCKDQHGCRF LQKQLDILGS KAADAIFEET |
| 601 | KDYTVELMTD SFGNYLIQKL LEEVTTEQRI VLTKISSPHF VEISLNPHGT RALQKLIECI |
| 661 | KTDEEAQIVV DSLRPYTVQL SKDLNGNHVI QKCLQRLKPE NFQFIFDAIS DSCIDIATHR |
| 721 | HGCCVLQRCL DHGTTEQCDN LCDKLLALVD KLTLDPFGNY VVQYIITKEA EKNKYDYTHK |
| 781 | IVHLLKPRAI ELSIHKFGSN VIEKILKTAI VSEPMILEIL NNGGETGIQS LLNDSYGNYV |
| 841 | LQTALDISHK QNDYLYKRLS EIVAPLLVGP IRNTPHGKRI IGMLHLDS. |

In some embodiments, a PUF5 protein of the disclosure comprises or consists of the amino acid sequence of

| (SEQ ID NO: 211) | |
|---|---|
| 1 | MSDSTGRINS KASDSSSISD HQTADLSIFN GSFDGGAFSS SNIPLFNFMG TGNQRFQYSP |
| 61 | HPFAKSSDPC RLAALTPSTP KGPLNLTPAD FGLADFSVGN ESFADFTANN TSFVGNVQSN |
| 121 | VRSTRLLPAW AVDNSGNIRD DLTLQDVVSN GSLIDFAMDR TGVKFLERHF PEDHDNEMHF |
| 181 | VLFDKLTEQG AVFTSLCRSA AGNFIIQKFV EHATLDEQER LVRKMCDNGL IEMCLDKFAC |
| 241 | RVVQMSIQKF DVSIAMKLVE KISSLDFLPL CTDQCAIHVL QKVVKLLPIS AWSFFVKFLC |
| 301 | RDDNLMTVCQ DKYGCRLVQQ TIDKLSDNPK LHCFNTRLQL LHGLMTSVAR NCFRLSSNEF |
| 361 | ANYVVQYVIK SSGVMEMYRD TIIEKCLLRN ILSMSQDKYA SHVVEGAFLF APPLLLSEMM |
| 421 | DEIFDGYVKD QETNRDALDI LLFHQYGNYV VQQMISICIS ALLGKEERKM VASEMRLYAK |
| 481 | WFDRIKNRVN RHSGRLERFS SGKKIIESLQ KLNVPMTMTN EPMPYWAMPT PLMDISAHFM |
| 541 | NKLNFQKNSV FDE. |

In some embodiments, a PUF6 protein of the disclosure comprises or consists of the amino acid sequence of

| (SEQ ID NO: 212) | |
|---|---|
| 1 | MTPNRRSTDS YNMLGASFDF DPDFSLLSNK THKNKNPKPP VKLLPYRHGS NTTSSDLDNY |
| 61 | IFNSGSGSSD DETPPPAAPI FISLEEVLLN GLLIDFAIDP SGVKFLEANY PLDSEDQIRK |
| 121 | AVFEKLTEST TLFVGLCHSR NGNFIVQKLV ELATPAEQRE LLRQMIDGGL LVMCKDKFAC |
| 181 | RVVQLALQKF DHSNVFQLIQ ELSTFDLAAM CTDQISIHVI QRVVKQLPVD MWTFFVHFLS |
| 241 | SGDSLMAVCQ DKYGCRLVQQ VIDRLAENTK LPCFKFRIQL LHSLMTCIVR NCYRLSSNEF |
| 301 | ANYVIQYVIK SSGIMEMYRD TIIDKCLLRN LLSMSQDKYA SHVIEGAFLF APPALLHEMM |
| 361 | EEIFSGYVKD VELNRDALDI LLFHQYGNYV VQQMISICTA ALIGKEERQL PPAILLLYSG |
| 421 | WYEKMKQRVL QHASRLERFS SGKKIIDSVM RHGVPTAAAI NAQAAPSLME LTAQFDAMFP |
| 481 | SFLAR. |

In some embodiments, a PUF7 protein of the disclosure comprises or consists of the amino acid sequence of

| (SEQ ID NO: 213) | |
|---|---|
| 1 | MTPNRRSTDS YNMLGASFDF DPDFSLLSNK THKNKNPKPP VKLLPYRHGS NTTSSDSDSY |
| 61 | IFNSGSGSSD AETPAPVAPI FISLEDVLLN GQLIDFAIDP SGVKFLEANY PLDSEDQIRK |
| 121 | AVFEKFTEST TLFVGLCHSR NGNFIVQKLV ELATPAEQRE LLRQMIDGGL LAMCKDKFAC |
| 181 | RVVQLALQKF DHSNVFQLIQ ELSTFDLAAM CTDQISIHVI QRVVKQLPVD MWTFFVHFLS |
| 241 | SGDSLMAVCQ DKYGCRLVQQ VIDRLAENPK LPCFKFRIQL LHSLMTCIVR NCYRLSSNEF |
| 301 | ANYVIQYVIK SSGIMEMYRD TIIDKCLLRN LLSMSQDKYA SHVIEGAFLF APPALLHEMM |
| 361 | EEIFSGYVKD VESNRDALDI LLFHQYGNYV VQQMISICTA ALIGKEEREL PPAILLLYSG |
| 421 | WYEKMKQRVL QHASRLERFS SGKKIIDSVM RHGVPTAAAV NAQAAPSLME LTAQFDAMFP |
| 481 | SFLAR. |

In some embodiments, a PUF8 protein of the disclosure comprises or consists of the amino acid sequence of

| (SEQ ID NO: 214) | |
|---|---|
| 1 | MSRPISIGNT CTFDPSASPI ESLGRSIGAQ KIVDSVCGSP IRSYGRHIST NPKNERLPDT |
| 61 | PEFQFATYMH QGGKVIGQNT LHMFGTPPSC YCAQENIPIS SNVGHVLSTI NNNYMNHQYN |
| 121 | GSNMFSNQMT QMLQAQAYND LQMHQAHSQS IRVPVQPSAT GIFSNPYREP TTTDDLLTRY |
| 181 | RANPAMMKNL KLSDIRGALL KFAKDQVGSR FIQQELASSK DRFEKDSIFD EVVSNADELV |
| 241 | DDIFGNYVVQ KFFEYGEERH WARLVDAIID RVPEYAFQMY ACRVLQKALE KINEPLQIKI |
| 301 | LSQIRHVIHR CMKDQNGNHV VQKAIEKVSP QYVQFIVDTL LESSNTIYEM SVDPYGCRVV |
| 361 | QRCLEHCSPS QTKPVIGQIH KRFDEIANNQ YGNYVVQHVI EHGSEEDRMV IVTRVSNNLF |
| 421 | EFATHKYSSN VIEKCLEQGA VYHKSMIVGA ACHHQEGSVP IVVQMMKDQY ANYVVQKMFD |
| 481 | QVTSEQRREL ILTVRPHIPV LRQFPHGKHI LAKLEKYFQK PAVMSYPYQD MQGSH. |

In some embodiments, a PUF9 protein of the disclosure comprises or consists of the amino acid sequence of

| (SEQ ID NO: 215) | |
|---|---|
| 1 | MADPNWAYAP PTNYYADHSI AKPIMISGGH PSQDQGHSPK SESFGQSVTT AFNGMVDNLV |
| 61 | GSPSSSVQQR NYFTTTPFPI SRSPNDRNDD KIMGNGSYGV PIPIPQDGVP QGTPDFQMTP |
| 121 | FLQQGGHLIG GSPNGPVQVS GNWYSGGAGI FSTMQQADPS NGMPGMAAEF VNNENGMPGP |
| 181 | NGMHQQAMIS GSPPFPYQNM MNLTTSFGAM GLGPQQIQQR DPQMFQQPIL HEPIQGMAQN |
| 241 | GFGQQVFFTQ MQNQQHPQGQ AQQQLQQLAQ QHQQQQNSQQ FFGQGPNGMG NGGVMNDWSQ |
| 301 | RSFGMPQQQA QQNGLPPNFS QNPPRRRGPE DPNGQTPKTL QDIKNNVIEF AKDQHGSRFI |
| 361 | QQKLERASLR DKAAIFTPVL ENAEELMTDV FGNYVIQKFF EFGNNEQRNQ LVGTIRGNVM |
| 421 | KLALQMYGCR VIQKALEYVE EKYQHEILGE MEGQVLKCVK DQNGNHVIQK VIERVEPERL |
| 481 | QFIIDAFTKN NSDNVYTLSV HPYGCRVIQR VLEYCNEEQK QPVLDALQIH LKQLVLDQYG |
| 541 | NYVIQHVIEH GSPSDKEQIV QDVISDDLLK FAQHKFASNV IEKCLTFGGH AERNLIIDKV |
| 601 | CGDPNDPSPP LLQMMKDPFA NYVVQKMLDV ADPQHRKKIT LTIKPHIATL RKYNFGKHIL |
| 661 | LKLEKYFAKQ APANSSNSSS NDQIYEHSPF DIPLGADFSN HPF. |

[0121] In some embodiments of the compositions of the disclosure, the first RNA binding protein does not require multimerization for RNA-binding activity. In some embodiments, the first RNA binding protein is not a monomer of a multimer complex. In some embodiments, a multimer protein complex does not comprise the first RNA binding protein.

[0122] In some embodiments of the compositions of the disclosure, the first RNA binding protein selectively binds to a target sequence within the RNA molecule. In some embodiments, the first RNA binding protein does not comprise an affinity for a second sequence within the RNA molecule. In some embodiments, the first RNA binding protein does not comprise a high affinity for or selectively bind a second sequence within the RNA molecule.

[0123] In some embodiments of the compositions of the disclosure, an RNA genome or an RNA transcriptome comprises the RNA molecule.

[0124] In some embodiments of the compositions of the disclosure, the first RNA binding protein comprises between 2 and 1300 amino acids, inclusive of the endpoints.

[0125] In some embodiments of the compositions of the disclosure, the sequence encoding the first RNA binding protein further comprises a nuclear localization signal (NLS). In some embodiments, the sequence encoding a nuclear localization signal (NLS) is positioned 3′ to the sequence encoding the first RNA binding protein. In some embodiments, the first RNA binding protein comprises an NLS at a C-terminus of the protein.

[0126] In some embodiments of the compositions of the disclosure, the sequence encoding the first RNA binding protein further comprises a first sequence encoding a first NLS and a second sequence encoding a second NLS. In some embodiments, the sequence encoding the first NLS or the second NLS is positioned 3′ to the sequence encoding the first RNA binding protein. In some embodiments, the first RNA binding protein comprises the first NLS or the second NLS at a C-terminus of the protein.

[0127] In some embodiments of the compositions of the disclosure, the second RNA binding protein comprises or consists of a nuclease domain. In some embodiments, the second RNA binding protein binds RNA in a manner in which it associates with RNA. In some embodiments, the second RNA binding protein associates with RNA in a manner in which it cleaves RNA.

[0128] In some embodiments of the compositions of the disclosure, the sequence encoding the second RNA binding protein comprises or consists of an RNAse. In some embodiments, the second RNA binding protein comprises or consists of an RNAse1 polypeptide. In some embodiments, the RNAse1 polypeptide comprises or consists of:
[0129] KESRAKKFQRQHMDSDSSPSSSSTYCNQMMRRRNMTQGLCKPVNTFVHEPLVDVQNV CFQEKVTCKNGQGNCYKSNSSMHITDCRLTNGSRYPNCAYRTSPKERHIIVACEGSPYV PVHFDASVEDST (SEQ ID NO: 20). In some embodiments, the second RNA binding protein comprises or consists of an RNAse4 polypeptide. In some embodiments, the RNAse4 polypeptide comprises or consists of:
[0130] QDGMYQRFLRQHVHPEETGGSDRYCDLMMQRRKMTLYHCKRFNTFIHEDIWNIRSICS TTNIQCKNGKMNCHEGVVKVTDCRDTGSSRAPNCRYRAIASTRRVVIACEGNPQVPVH FDG (SEQ ID NO: 21). In some embodiments, the second RNA binding protein comprises or consists of an RNAse6 polypeptide. In some embodiments, the RNAse6 polypeptide comprises or consists of:
[0131] WPKRLTKAHWFEIQHIQPSPLQCNRAMSGINNYTQHCKHQNTFLHDSFQNVAAVCDLL SIVCKNRRHNCHQSSKPVNMTDCRLTSGKYPQCRYSAAAQYKFFIVACDPPQKSDPPYK LVPVHLDSIL (SEQ ID NO: 22). In some embodiments, the second RNA binding protein comprises or consists of an RNAse7 polypeptide. In some embodiments, the RNAse7 polypeptide comprises or consists of:
[0132] APARAGFCPLLLLLLLGLWVAEIPVSAKPKGMTSSQWFKIQHMQPSPQACNSAMKNINK HTKRCKDLNTFLHEPFSSVAATCQTPKIACKNGDKNCHQSHGPVSLTMCKLTSGKYPNC RYKEKRQNKSYVVACKPPQKKDSQQFHLVPVHLDRVL (SEQ ID NO: 23). In some embodiments, the second RNA binding protein comprises or consists of an RNAse8 polypeptide. In some embodiments, the RNAse8 polypeptide comprises or consists of:
[0133] TSSQWFKTQHVQPSPQACNSAMSIINKYTERCKDLNTFLHEPFSSVAITCQTPNIACKNSC KNCHQSHGPMSLTMGELTSGKYPNCRYKEKHLNTPYIVACDPPQQGDPGYPLVPVHLD KVV (SEQ ID NO: 24). In some embodiments, the second RNA binding protein comprises or consists of an RNAse2 polypeptide. In some embodiments, the RNAse2 polypeptide comprises or consists of:
[0134] KPPQFTWAQWFETQHINMTSQQCTNAMQVINNYQRRCKNQNTFLLTTFANVVNVCGN PNMTCPSNKTRKNCHHSGSQVPLIHCNLTTPSPQNISNCRYAQTPANMFYIVACDNRDQ RRDPPQYPVVPVHLDRII (SEQ ID NO: 25). In some embodiments, the second RNA binding protein comprises or consists of an RNAse6PL polypeptide. In some embodiments, the RNAse6PL polypeptide comprises or consists of:
[0135] DKRLRDNHEWKKLIMVQHWPETVCEKIQNDCRDPPDYWTIHGLWPDKSEGCNRSWPF NLEEIKKNWMEITDSSLPSPSMGPAPPRWMRSTPRRSTLAEAWNSTGSWTSTGGCALPP AALPSGDLCCRPSLTAGSRGVGVDLTALHQLLHVHYSATGIIPEECSEPTKPFQIILHHDH TEWVQSIGMPIWGTISSSESAIGKNEESQPACAVLSHDS (SEQ ID NO: 26). In some embodiments, the second RNA binding protein comprises or consists of an RNAseL polypeptide. In some embodiments, the RNAseL polypeptide comprises or consists of:
[0136] AAVEDNHLLIKAVQNEDVDLVQQLLEGGANVNFQEEEGGWTPLHNAVQMSREDIVEL LLRHGADPVLRKKNGATPFILAAIAGSVKdLLKLFLSKGADVNECDFYGFTAFMEAAVY GKVKALKFLYKRGANVNLRRKTKEDQERLRKGGATALMDAAEKGHVEVLKILLDEM GADVNACDNMGRNALIHALLSSDDSDVEAITHLLLDHGADVNVRGERGKTPLILAVEK KHLGLVQRLLEQEHIEINDTDSDGKTALLLAVELKLKKIAELLCKRGASTDCGDLVMTA RRNYDHSLVKVLLSHGAKEDFHPPAEDWKPQSSHWGAALKDLHRIYRPMIGKLKFFID EKYKIADTSEGGIYLGFYEKQEVAVKTFCEGSPRAQREVSCLQSSRENSHLVTFYGSESH RGHLFVCVTLCEQTLEACLDVHRGEDVENEEDEFARNVLSSIFKAVQELHLSCGYTHQD LQPQNILIDSKKAAHLADFDKSIKWAGDPQEVKRDLEDLGRLVLYVVKKGSISFEDLKA QSNEEVVQLSPDEETKDLIHRLFHPGEHVRDCLSDLLGHPFFWTWESRYRTLRNVGNES DIKTRKSESEILRLLQPGPSEHSKSFDKWTTKINECVMKKMNKFYEKRGNFYQNTVGDL LKFIRNLGEHIDEEKHKKMKLKIGDPSLYFQKTFPDLVIYVYTKLQNTEYRKHFPQTHSP NKPQCDGAGGASGLASPGC (SEQ ID NO: 27). In some embodiments, the second RNA binding protein comprises or consists of an RNAseT2 polypeptide. In some embodiments, the RNAseT2 polypeptide comprises or consists of:
[0137] VQHWPETVCEKIQNDCRDPPDYWTIHGLWPDKSEGCNRSWPFNLEEIKDLLPEMRAYW PDVIHSFPNRSRFWKHEWEKHGTCAAQVDALNSQKKYFGRSLELYRELDLNSVLLKLGI KPSINYYQVADFKDALARVYGVIPKIQCLPPSQDEEVQTIGQIELCLTKQDQQLQNCTEP GEQPSPKQEVWLANGAAESRGLRVCEDGPVFYPPPKKTKH (SEQ ID NO: 28). In some embodiments, the second RNA binding protein comprises or consists of an RNAse11 polypeptide. In some embodiments the RNAse11 polypeptide comprises or consists of:
[0138] EASESTMKIIKEEFTDEEMQYDMAKSGQEKQTIEILMNPILLVKNTSLSMSKDDMSSTLL TFRSLHYNDPKGNSSGNDKECCNDMTVWRKVSEANGSCKWSNNFIRSSTEVMRRVHR APSCKFVQNPGISCCESLELENTVCQFTTGKQFPRCQYHSVTSLEKILTVLTGHSLMSWL VCGSKL (SEQ ID NO: 29). In some embodiments, the second RNA binding protein comprises or consists of an RNAseT2-like polypeptide. In some embodiments, the RNAseT2-like polypeptide comprises or consists of:

(SEQ ID NO: 30)
XLGGADKRLRDNHEWKKLIMVQHWPETVCEKIQNDCRDPPDYWTIHGLWP
DKSEGCNRSWPFNLEEIKDLLPEMRAYWPDVIHSFPNRSRFWKHEWEKHG
TCAAQVDALNSQKKYFGRSLELYRELDLNSVLLKLGIKPSINYYQTTEED
LNLDVEPTTEDTAEEVTIHVLLHSALFGEIGPRRW.

[0139] In some embodiments of the compositions of the disclosure, the second RNA binding protein comprises or consists of a mutated RNAse. In some embodiments, the second RNA binding protein comprises or consists of a mutated Rnase1 (Rnase1(K41R)) polypeptide. In some embodiments, the Rnase1(K41R) polypeptide comprises or consists of:
[0140] KESRAKKFQRQHMDSDSSPSSSSTYCNQMMRRRNMTQGRCRPVNTFVHEPLVDVQNV CFQEKVTCKNGQGNCYKSNSSMHITDCRLTNGSRYPNCAYRTSPKERHIIVACEGSPYV PVHFDASVEDST (SEQ ID NO: 116). In some embodiments, the second RNA binding protein comprises or consists of a mutated Rnase1 (Rnase1(K41R, D121E)) polypeptide. In some embodiments, the Rnase1 (Rnase1(K41R, D121E)) comprises or consists of:
[0141] KESRAKKFQRQHMDSDSSPSSSSTYCNQMMRRRNMTQGRCRPVNTFVHEPLVDVQNV CFQEKVTCKNGQGNCYKSNSSMHITDCRLTNGSRYPNCAYRTSPKERHIIVACEGSPYV PVHFEASVEDST (SEQ ID NO: 117). In some embodiments, the second RNA binding protein comprises or consists of a mutated Rnase1 (Rnase1(K41R, D121E, Hi19N)) polypeptide. In some embodiments, the Rnase1 (Rnase1(K41R, D121E, H119N)) polypeptide comprises or consists of:
[0142] KESRAKKFQRQHMDSDSSPSSSSTYCNQMMRRRNMTQGRCRPVNTFVHEPLVDVQNV CFQEKVTCKNGQGNCYKSNSSMHITDCRLTNGSRYPNCAYRTSPKERHIIVACEGSPYV PVNFEASVEDST (SEQ ID NO: 118). In some embodiments, the second RNA binding protein comprises or consists of a mutated Rnase1. In some embodiments, the second RNA binding protein comprises or consists of a mutated Rnase1 (Rnase1(H119N)) polypeptide. In some embodiments, the Rnase1 (Rnase1(H119N)) polypeptide comprises or consists of:
[0143] KESRAKKFQRQHMDSDSSPSSSSTYCNQMMRRRNMTQGRCKPVNTFVHEPLVDVQNV CFQEKVTCKNGQGNCYKSNSSMHITDCRLTNGSRYPNCAYRTSPKERHIIVACEGSPYV PVNFDASVEDST (SEQ ID NO: 119). In some embodiments, the second RNA binding protein comprises or consists of a mutated Rnase1 (Rnase1(R39D, N67D, N88A, G89D, R91D, H119N)) polypeptide. In some embodiments, the Rnase1 (Rnase1(R39D, N67D, N88A, G89D, R91D, H119N)) polypeptide comprises or consists of:
[0144] KESRAKKFQRQHMDSDSSPSSSSTYCNQMMRRRNMTQGDCKPVNTFVHEPLVDVQNV CFQEKVTCKDGQGNCYKSNSSMHITDCRLTADSDYPNCAYRTSPKERHIIVACEGSPYV PVNFDASVEDST (SEQ ID NO: 120). In some embodiments, the second RNA binding protein comprises or consists of a mutated Rnase1 (Rnase1(R39D, N67D, N88A, G89D, R91D, H119N)) polypeptide. In some embodiments, the Rnase1 (Rnase1(R39D, N67D, N88A, G89D, R91D, H119N, K41R, D121E)) polypeptide comprises or consists of:
[0145] KESRAKKFQRQHMDSDSSPSSSSTYCNQMMRRRNMTQGDCRPVNTFVHEPLVDVQNV CFQEKVTCKDGQGNCYKSNSSMHITDCRLTADSDYPNCAYRTSPKERHIIVACEGSPYV PVNFEASVEDST (SEQ ID NO: 121). In some embodiments, the second RNA binding protein comprises or consists of a mutated Rnase1 (Rnase1(R39D, N67D, N88A, G89D, R91D, H119N)) polypeptide. In some embodiments, the Rnase1 (Rnase1(R39D, N67D, N88A, G89D, R91D)) polypeptide comprises or consists of:

(SEQ ID NO: 122)
KESRAKKFQRQHMDSDSSPSSSSTYCNQMMRRRNMTQGDCKPVNTFVHEP
LVDVQNVCFQEKVTCKDGQGNCYKSNSSMHITDCRLTADSDYPNCAYRTS
PKERHIIVACEGSPYVPVHFDASVEDST.

In some embodiments, the second RNA binding protein comprises or consists of a mutated Rnase1 (Rnase1 (R39D, N67D, N88A, G89D, R91D, H119N, K41R, D121E)) polypeptide comprises or consists of:

(SEQ ID NO: 225)
KESRAKKFQRQHMDSDSSPSSSSTYCNQMMRRRNMTQGDCRPVNTFVHEP
LVDVQNVCFQEKVTCKDGQGNCYKSNSSMHITDCRLTADSDYPNCAYRTS
PKERHIIVACEGSPYVPVNFEASVEDST.

[0146] In some embodiments of the compositions of the disclosure, the second RNA binding protein comprises or consists of a NOB1 polypeptide. In some embodiments, the NOB1 polypeptide comprises or consists of:

(SEQ ID NO: 31)
APVEHVVADAGAFLRHAALQDIGKNIYTIREVVTEIRDKATRRRLAVLPY
ELRFKEPLPEYVRLVTEFSKKTGDYPSLSATDIQVLALTYQLEAEFVGVS
HLKQEPQKVKVSSSIQHPETPLHISGFHLPYKPKPPQETEKGHSACEPEN
LEFSSFMFWRNPLPNIDHELQELLIDRGEDVPSEEEEEEENGFEDRKDDS
DDDGGGWITPSNIKQIQQELEQCDVPEDVRVGCLTTDFAMQNVLLQMGLH
VLAVNGMLIREARSYILRCHGCFKTTSDMSRVFCSHCGNKTLKKVSVTV.

[0147] In some embodiments of the compositions of the disclosure, the second RNA binding protein comprises or consists of an endonuclease. In some embodiments, the second RNA binding protein comprises or consists of an endonuclease V (ENDOV). In some embodiments, the ENDOV polypeptide comprises or consists of:
[0148] AFSGLQRVGGVDVSFVKGDSVRACASLVVLSFPELEVVYEESRMVSLTAPYVSGFLAFR EVPFLLELVQQLREKEPGLMPQVLLVDGNGVLHHRGFGVACHLGVLTDLPCVGVAKKL LQVDGLENNALHKEKIRLLQTRGDSFPLLGDSGTVLGMALRSHDRSTRPLYISVGHRMS LEAAVRLTCCCCRFRIPEPVRQADICSREHIRKS (SEQ ID NO: 32). In some embodiments, the second RNA binding protein comprises or consists of an endonuclease G (ENDOG) polypeptide. In some embodiments, the ENDOG polypeptide comprises or consists of:
[0149] AELPPVPGGPRGPGELAKYGLPGLAQLKSRESYVLCYDPRTRGALWVVEQLRPERLRG DGDRRECDFREDDSVHAYHRATNADYRGSGFDRGHLAAAANHRWSQKAMDDTFYLS NVAPQVPHLNQNAWNNLEKYSRSLTRSYQNVYVCTGPLFLPRTEADGKSYVKYQVIGK NHVAVPTHFFKVLILEAAGGQIELRTYVMPNAPVDEAIPLERFLVPIESIERASGLLFVPNI LARAGSLKAITAGSK (SEQ ID NO: 33). In some embodiments, the second RNA binding protein comprises or consists of an endonuclease D1 (ENDOD1) polypeptide. In some embodiments, the ENDOD1 polypeptide comprises or consists of:
[0150] RLVGEEEAGFGECDKFFYAGTPPAGLAADSHVKICQRAEGAERFATLYSTRDRIPVYSA FRAPRPAPGGAEQRWLVEPQIDDPNSNLEEAINEAEAITSVNSLGSKQALNTDYLDSDYQ RGQLYPFSLSSDVQVATFTLTNSAPMTQSFQERWYVNLHSLMDRALTPQCGSGEDLYIL TGTVPSDYRVKDKVAVPEFVWLAACCAVPGGGWAMGFVKHTRDSDIIEDVMVKDLQ KLLPFNPQLFQNNCGETEQDTEKMKKILEVVNQIQDEERMVQSQKSSSPLSSTRSKRSTL LPPEASEGSSSFLGKLMGFIATPFIKLFQLIYYLVVAILKNIVYFLWCVTKQVINGIESCLY RLGSATISYFMAIGEELVSIPWKVLKVVAKVIRALLRILCCLLKAICRVLSIPVRVLVDVA TFPVYTMGAIPIVCKDIALGLGGTVSLLFDTAFGTLGGLFQVVFSVCKRIGYKVTFDNSG EL (SEQ ID NO: 34). In some embodiments, the second RNA binding protein comprises or consists of a Human flap endonuclease-1 (hFEN1) polypeptide. In some embodiments, the hFEN1 polypeptide comprises or consists of:
[0151] MGIQGLAKLIADVAPSAIRENDIKSYFGRKVAIDASMSIYQFLIAVRQGGDVLQNEEGET TSHLMGMFYRTIRMMENGIKPVYVFDGKPPQLKSGELAKRSERRAEAEKQLQQAQAAG AEQEVEKFTKRLVKVTKQHNDECKHLLSLMGIPYLDAPSEAEASCAALVKAGKVYAAA TEDMDCLTFGSPVLMRHLTASEAKKLPIQEFHLSRILQELGLNQEQFVDLCILLGSDYCE SIRGIGPKRAVDLIQKHKSIEEIVRRLDPNKYPVPENWLHKEAHQLFLEPEVLDPESVELK WSEPNEEELIKFMCGEKQFSEERIRSGVKRLSKSRQGSTQGRLDDFFKVTGSLSSAKRKE PEPKGSTKKKAKTGAAGKFKRGK (SEQ ID NO: 35). In some embodiments, the second RNA binding protein comprises or consists of a DNA repair endonuclease XPF (ERCC4) polypeptide. In some embodiments, the ERCC4 polypeptide comprises or consists of:

(SEQ ID NO: 124)
MESGQPARRIAMAPLLEYERQLVLELLDTDGLVVCARGLGADRLLYHFLQ
LHCHPACLVLVLNTQPAEEEYFINQLKIEGVEHLPRRVTNEITSNSRYEV
YTQGGVIFATSRILVVDFLTDRIPSDLITGILVYRAHRIIESCQEAFILR
LFRQKNKRGFIKAFTDNAVAFDTGFCHVERVMRNLFVRKLYLWPRFHVAV
NSFLEQHKPEVVEIHVSMTPTMLAIQTAILDILNACLKELKCHNPSLEVE
DLSLENAIGKPFDKTIRHYLDPLWHQLGAKTKSLVQDLKILRTLLQYLSQ
YDCVTFLNLLESLRATEKAFGQNSGWLFLDSSTSMFINARARVYHLPDAK
MSKKEKISEKMEIKEGEGILWG.

[0152] In some embodiments of the compositions of the disclosure, the second RNA binding protein comprises or consists of an Endonuclease III-like protein 1 (NTHL) polypeptide. In some embodiments, the NTHL polypeptide comprises or consists of:

(SEQ ID NO: 123)
CSPQESGMTALSARMLTRSRSLGPGAGPRGCREEPGPLRRREAAAEARKS
HSPVKRPRKAQRLRVAYEGSDSEKGEGAEPLKVPVWEPQDWQQQLVNIRA
MRNKKDAPVDHLGTEHCYDSSAPPKVRRYQVLLSLMLSSQTKDQVTAGAM
QRLRARGLTVDSILQTDDATLGKLIYPVGFWRSKVKYIKQTSAILQQHYG
GDIPASVAELVALPGVGPKMAHLAMAVAWGTVSGIAVDTHVHRIANRLRW
TKKATKSPEETRAALEEWLPRELWHEINGLLVGFGQQTCLPVHPRCHACL
NQALCPAAQGL.

[0153] In some embodiments of the compositions of the disclosure, the second RNA binding protein comprises or consists of a human Schlafen 14 (hSLFN14) polypeptide. In some embodiments, the hSLFN14 polypeptide comprises or consists of:

(SEQ ID NO: 36)
ESTHVEFKRFTTKKVIPRIKEMLPHYVSAFANTQGGYVLIGVDDKSKEVV
GCKWEKVNPDLLKKEIENCIEKLPTFHFCCEKPKVNFTTKILNVYQKDVL
DGYVCVIQVEPFCCVVFAEAPDSWIMKDNSVTRLTAEQWVVMMLDTQSAP
PSLVTDYNSCLISSASSARKSPGYPIKVHKFKEALQ.

[0154] In some embodiments of the compositions of the disclosure, the second RNA binding protein comprises or consists of a human beta-lactamase-like protein 2 (hLACTB2) polypeptide. In some embodiments, the hLACTB2 polypeptide comprises or consists of:

(SEQ ID NO: 37)
TLQGTNTYLVGTGPRRILIDTGEPAIPEYISCLKQALTEFNTAIQEIVVT
HWHRDHSGGIGDICKSINNDTTYCIKKLPRNPQREEIIGNGEQQYVYLKD
GDVIKTEGATLRVLYTPGHTDDHMALLLEEENAIFSGDCILGEGTTVFED
LYDYMNSLKELLKIKADIIYPGHGPVIHNAEAKIQQYISHRNIREQQILT
LFRENFEKSFTVMELVKIIYKNTPENLHEMAKHNLLLHLKKLEKEGKIFS
NTDPDKKWKAHL.

[0155] In some embodiments of the compositions of the disclosure, the second RNA binding protein comprises or consists of an apurinic/apyrimidinic (AP) endodeoxyribonuclease (APEX) polypeptide. In some embodiments, the second RNA binding protein comprises or consists of an apurinic/apyrimidinic (AP) endodeoxyribonuclease (APEX2) polypeptide. In some embodiments, the APEX2 polypeptide comprises or consists of:
[0156] MLRVVSWNINGIRRPLQGVANQEPSNCAAVAVGRILDELDADIVCLQETKVTRDALTEP LAIVEGYNSYFSFSRNRSGYSGVATFCKDNATPVAAEEGLSGLFATQNGDVGCYGNMD EFTQEELRALDSEGRALLTQHKIRTWEGKEKTLTLINVYCPHADPGRPERLVFKMRFYR LLQIRAEALLAAGSHVIILGDLNTAHRPIDHWDAVNLECFEEDPGRKWMDSLLSNLGCQ SASHVGPFIDSYRCFQPKQEGAFTCWSAVTGARHLNYGSRLDYVLGDRTLVIDTFQASF LLPEVMGSDHCPVGAVLSVSSVPAKQCPPLCTRFLPEFAGTQLKILRFLVPLEQSPVLEQ STLQHNNQTRVQTCQNKAQVRSTRPQPSQVGSSRGQKNLKSYFQPSPSCPQASPDIELPS LPLMSALMTPKTPEEKAVAKVVKGQAKTSEAKDEKELRTSFWKSVLAGPLRTPLCGGH REPCVMRTVKKPGPNLGRRFYMCARPRGPPTDPSSRCNFFLWSRPS (SEQ ID NO: 38). In some embodiments, the APEX2 polypeptide comprises or consists of:
[0157] MLRVVSWNINGIRRPLQGVANQEPSNCAAVAVGRILDELDADIVCLQETKVTRDALTEP LAIVEGYNSYFSFSRNRSGYSGVATFCKDNATPVAAEEGLSGLFATQNGDVGCYGNMD EFTQEELRALDSEGRALLTQHKIRTWEGKEKTLTLINVYCPHADPGRPERLVFKMRFYR LLQIRAEALLAAGSHVIILGDLNTAHRPIDHWDAVNLECFEEDPGRKWMDSLLSNLGCQ SASHVGPFIDSYRCFQPKQEGAFTCWSAVTGARHLNYGSRLDYVLGDRTLVIDTFQASF LLPEVMGSDHCPVGAVLSVSSVPAKQCPPLCTRFLPEFAGTQLKILRFLVPLEQSP (SEQ ID NO: 39). In some embodiments, the second RNA binding protein comprises or consists of an apurinic or apyrimidinic site lyase (APEX1) polypeptide. In some embodiments, the APEX1 polypeptide comprises or consists of:

(SEQ ID NO: 125)
PKRGKKGAVAEDGDELRTEPEAKKSKTAAKKNDKEAAGEGPALYEDPPDQ
KTSPSGKPATLKICSWNVDGLRAWIKKKGLDWVKEEAPDILCLQETKCSE
NKLPAELQELPGLSHQYWSAPSDKEGYSGVGLLSRQCPLKVSYGIGDEEH
DQEGRVIVAEFDSFVLVTAYVPNAGRGLVRLEYRQRWDEAFRKFLKGLAS
RKPLVLCGDLNVAHEEIDLRNPKGNKKNAGFTPQERQGFGELLQAVPLAD
SFRHLYPNTPYAYTFWTYMMNARSKNVGWRLDYFLLS.

[0158] In some embodiments of the compositions of the disclosure, the second RNA binding protein comprises or consists of an angiogenin (ANG) polypeptide. In some embodiments, the ANG polypeptide comprises or consists of:

(SEQ ID NO: 40)
[sequence omitted]

[0159] In some embodiments of the compositions of the disclosure, the second RNA binding protein comprises or consists of a heat responsive protein 12 (HRSP12) polypeptide. In some embodiments, the HRSP12 polypeptide comprises or consists of:

(SEQ ID NO: 41)
SSLIRRVISTAKAPGAIGPYSQAVLVDRTIYISGQIGMDPSSGQLVSGGV
AEEAKQALKNMGEILKAAGCDFTNVVKTTVLLADINDFNTVNEIYKQYFK
SNFPARAAYQVAALPKGSRIEIEAVAIQGPLTTASL.

[0160] In some embodiments of the compositions of the disclosure, the second RNA binding protein comprises or consists of a Zinc Finger CCCH-Type Containing 12A (ZC3H12A) polypeptide. In some embodiments, the ZC3H12A polypeptide comprises or consists of:
[0161] GGGTPKAPNLEPPLPEEEKEGSDLRPVVIDGSNVAMSHGNKEVFSCRGILLAVNWFLER GHTDITVFVPSWRKEQPRPDVPITDQHILRELEKKKILVFTPSRRVGGKRVVCYDDRFIV KLAYESDGIVVSNDTYRDLQGERQEWKRFIEERLLMYSFVNDKFMPPDDPLGRHGPSLD NFLRKKPLTLE (SEQ ID NO: 42). In some embodiments, the ZC3H12A polypeptide comprises or consists of:

(SEQ ID NO: 43)
SGPCGEKPVLEASPTMSLWEFEDSHSRQGTPRPGQELAAEEASALELQMK
VDFFRKLGYSSTEIHSVLQKLGVQADTNTVLGELVKHGTATERERQTSPD
PCPQLPLVPRGGGTPKAPNLEPPLPEEEKEGSDLRPVVIDGSNVAMSHGN
KEVFSCRGILLAVNWFLERGHTDITVFVPSWRKEQPRPDVPITDQHILRE
LEKKKILVFTPSRRVGGKRVVCYDDRFIVKLAYESDGIVVSNDTYRDLQG
ERQEWKRFIEERLLMYSFVNDKFMPPDDPLGRHGPSLDNFLRKKPLTLEH
RKQPCPYGRKCTYGIKCRFFHPERPSCPQRSVADELRANALLSPPRAPSK
DKNGRRPSPSSQSSSLLTESEQCSLDGKKLGAQASPGSRQEGLTQTYAPS
GRSLAPSGGSGSSFGPTDWLPQTLDSLPYVSQDCLDSGIGSLESQMSELW
GVRGGGPGEPGPPRAPYTGYSPYGSELPATAAFSAFGRAMGAGHFSVPAD
YPPAPPAFPPREYWSEPYPLPPPTSVLQEPPVQSPGAGRSPWGRAGSLAK
EQASVYTKLCGVFPPHLVEAVMGRFPQLLDPQQLAAEILSYKSQHPSE.

[0162] In some embodiments of the compositions of the disclosure, the second RNA binding protein comprises or consists of a Reactive Intermediate Imine Deaminase A (RIDA) polypeptide. In some embodiments, the RIDA polypeptide comprises or consists of:

(SEQ ID NO: 44)
SSLIRRVISTAKAPGAIGPYSQAVLVDRTIYISGQIGMDPSSGQLVSGGV
AEEAKQALKNMGEILKAAGCDFTNVVKTTVLLADINDFNTVNEIYKQYFK
SNFPARAAYQVAALPKGSRIEIEAVAIQGPLTTASL.

[0163] In some embodiments of the compositions of the disclosure, the second RNA binding protein comprises or consists of a Phospholipase D Family Member 6 (PDL6) polypeptide. In some embodiments, the PDL6 polypeptide comprises or consists of:

(SEQ ID NO: 126)
EALFFPSQVTCTEALLRAPGAELAELPEGCPCGLPHGESALSRLLRALLA
ARASLDLCLFAFSSPQLGRAVQLLHQRGVRVRVVTDCDYMALNGSQIGLL
RKAGIQVRHDQDPGYMHHKFAIVDKRVLITGSLNWTTQAIQNNRENVLIT
EDDEYVRLFLEEFERIWEQFNPTKYTFFPPKKSHGSCAPPVSRAGGRLLS
WHRTCGTSSESQT.

[0164] In some embodiments of the compositions of the disclosure, the second RNA binding protein comprises or consists of a mitochondrial ribonuclease P catalytic subunit (KIAA0391) polypeptide. In some embodiments, the KIAA0391 polypeptide comprises or consists of:

(SEQ ID NO: 127)
KARYKTLEPRGYSLLIRGLIHSDRWREALLLLEDIKKVITPSKKNYNDCI
QGALLHQDVNTAWNLYQELLGHDIVPMLETLKAFFDFGKDIKDDNYSNKL
LDILSYLRNNQLYPGESFAHSIKTWFESVPGKQWKGQFTTVRKSGQCSGC
GKTIESIQLSPEEYECLKGKIMRDVIDGGDQYRKTTPQELKRFENFIKSR
PPFDVVIDGLNVAKMFPKVRESQLLLNVVSQLAKRNLRLLVLGRKHMLRR
SSQWSRDEMEEVQKQASCFFADDISEDDPFLLYATLHSGNHCRFITRDLM
RDHKACLPDAKTQRLFFKWQQGHQLAIVNRFPGSKLTFQRILSYDTVVQT
TGDSWHIPYDEDLVERCSCEVPTKWLCLHQKT.

[0165] In some embodiments of the compositions of the disclosure, the second RNA binding protein comprises or consists of an argonaute 2 (AGO2) polypeptide.

[0166] In some embodiments of the compositions of the disclosure, the AGO2 polypeptide comprises or consists of:

(SEQ ID NO: 128)
SVEPMFRHLKNTYAGLQLVVVILPGKTPVYAEVKRVGDTVLGMATQCVQM
KNVQRTTPQTLSNLCLKINVKLGGVNNILLPQGRPPVFQQPVIFLGADVT
HPPAGDGKKPSIAAVVGSMDAHPNRYCATVRVQQHRQEIIQDLAAMVREL
LIQFYKSTRFKPTRIIFYRDGVSEGQFQQVLHHELLAIREACIKLEKDYQ
PGITFIVVQKRHHTRLFCTDKNERVGKSGNIPAGTTVDTKITHPTEFDFY
LCSHAGIQGTSRPSHYHVLWDDNRFSSDELQILTYQLCHTYVRCTRSVSI
PAPAYYAHLVAFRARYHLVDKEHDSAEGSHTSGQSNGRDHQALAKAVQVH
QDTLRTMYFA.

[0167] In some embodiments of the compositions of the disclosure, the second RNA binding protein comprises or consists of a mitochondrial nuclease EXOG (EXOG) polypeptide. In some embodiments, the EXOG polypeptide comprises or consists of:

(SEQ ID NO: 129)
QGAEGALTGKQPDGSAEKAVLEQFGFPLTGTEARCYTNHALSYDQAKRVP
RWVLEHISKSKIMGDADRKHCKFKPDPMPPTFSAFNEDYVGSGWSRGHMA
PAGNNKFSSKAMAETFYLSNIVPQDFDNNSGYWNRIEMYCRELTERFEDV
WVVSGPLTLPQTRGDGKKIVSYQVIGEDNVAVPSHLYKVILARRSSVSTE
PLALGAFVVPNEAIGFQPQLTEFQVSLQDLEKLSGLVFFPHLDRTSDIRN
ICSVDTCKLLDFQEFTLYLSTRKIEGARSVLRLEKIMENLKNAEIEPDDY
FMSRYEKKLEELKAKEQSGTQIRKPS.

[0168] In some embodiments of the compositions of the disclosure, the second RNA binding protein comprises or consists of a Zinc Finger CCCH-Type Containing 12D (ZC3H12D) polypeptide. In some embodiments, the ZC3H12D polypeptide comprises or consists of:

(SEQ ID NO: 130)
EHPSKMEFFQKLGYDREDVLRVLGKLGEGALVNDVLQELIRTGSRPGALE
HPAAPRLVPRGSCGVPDSAQRGPGTALEEDFRTLASSLRPIVIDGSNVAM
SHGNKETFSCRGIKLAVDWFRDRGHTYIKVFVPSWRKDPPRADTPIREQH
VLAELERQAVLVYTPSRKVHGKRLVCYDDRYIVKVAYEQDGVIVSNDNYR
DLQSENPEWKWFIEQRLLMFSFVNDRFMPPDDPLGRHGPSLSNFLSRKPK
PPEPSWQHCPYGKKCTYGIKCKFYHPERPHHAQLAVADELRAKTGARPGA
GAEEQRPPRAPGGSAGARAAPREPFAHSLPPARGSPDLAALRGSFSRLAF
SDDLGPLGPPLPVPACSLTPRLGGPDWVSAGGRVPGPLSLPSPESQFSPG
DLPPPPGLQLQPRGEHRPRDLHGDLLSPRRPPDDPWARPPRSDRFPGRSV
WAEPAWGDGATGGLSVYATEDDEGDARARARIALYSVFPRDQVDRVMAAF
PELSDLARLILLVQRCQSAGAPLGKP.

[0169] In some embodiments of the compositions of the disclosure, the second RNA binding protein comprises or consists of an endoplasmic reticulum to nucleus signaling 2 (ERN2) polypeptide. In some embodiments, the ERN2 polypeptide comprises or consists of:

(SEQ ID NO: 131)
RQQQPQVVEKQQETPLAPADFAHISQDAQSLHSGASRRSQKRLQSPSKQA
QPLDDPEAEQLTVVGKISFNPKDVLGRGAGGTFVFRGQFEGRAVAVKRLL
RECFGLVRREVQLLQESDRHPNVLRYFCTERGPQFHYIALELCRASLQEY
VENPDLDRGGLEPEVVLQQLMSGLAHLHSLHIVHRDLKPGNILITGPDSQ
GLGRVVLSDFGLCKKLPAGRCSFSLHSGIPGTEGWMAPELLQLLPPDSPT
SAVDIFSAGCVFYYVLSGGSHPFGDSLYRQANILTGAPCLAHLEEEVHDK
VVARDLVGAMLSPLPQPRPSAPQVLAHPFFWSRAKQLQFFQDVSDWLEKE
SEQEPLVRALEAGGCAVVRDNWHEHISMPLQTDLRKFRSYKGTSVRDLLR
AVRNKKHHYRELPVEVRQALGQVPDGFVQYFTNRFPRLLLHTHRAMRSCA
SESLFLPYYPPDSEARRPCPGATGR.

[0170] In some embodiments of the compositions of the disclosure, the second RNA binding protein comprises or consists of a pelota mRNA surveillance and ribosome rescue factor (PELO) polypeptide. In some embodiments, the PELO polypeptide comprises or consists of:

(SEQ ID NO: 132)
KLVRKNIEKDNAGQVTLVPEEPEDMWHTYNLVQVGDSLRASTIRKVQTES
STGSVGSNRVRTTLTLCVEAIDFDSQACQLRVKGTNIQENEYVKMGAYHT
IELEPNRQFTLAKKQWDSVVLERIEQACDPAWSADVAAVVMQEGLAHICL
VTPSMTLTRAKVEVNIPRKRKGNCSQHDRALERFYEQVVQAIQRHIHFDV
VKCILVASPGFVREQFCDYLFQQAVKTDNKLLLENRSKFLQVHASSGHKY
SLKEALCDPTVASRLSDTKAAGEVKALDDFYKMLQHEPDRAFYGLKQVEK
ANEAMAIDTLLISDELFRHQDVATRSRYVRLVDSVKENAGTVRIFSSLHV
SGEQLSQLTGVAAILRFPVPELSDQEGDSSSEED.

[0171] In some embodiments of the compositions of the disclosure, the second RNA binding protein comprises or consists of a YBEY metallopeptidase (YBEY) polypeptide. In some embodiments, the YBEY polypeptide comprises or consists of:

(SEQ ID NO: 133)
SLVIRNLQRVIPIRRAPLRSKIEIVRRILGVQKFDLGIICVDNKNIQHIN
RIYRDRNVPTDVLSFPFHEHLKAGEFPQPDFPDDYNLGDIFLGVEYIFHQ
CKENEDYNDVLTVTATHGLCHLLGFTHGTEAEWQQMFQKEKAVLDELGRR
TGTRLQPLTRGLFGGS.

[0172] In some embodiments of the compositions of the disclosure, the second RNA binding protein comprises or consists of a cleavage and polyadenylation specific factor 4 like (CPSF4L) polypeptide. In some embodiments, the CPSF4L comprises or consists of:

(SEQ ID NO: 134)
QEVIAGLERFTFAFEKDVEMQKGTGLLPFQGMDKSASAVCNFFTKGLCEK
GKLCPFRHDRGEKMVVCKHWLRGLCKKGDHCKFLHQYDLTRMPECYFYSK
FGDCSNKECSFLHVKPAFKSQDCPWYDQGFCKDGPLCKYRHVPRIMCLNY
LVGFCPEGPKCQFAQKIREFKLLPGSKI.

[0173] In some embodiments of the compositions of the disclosure, the second RNA binding protein comprises or consists of an hCG_2002731 polypeptide. In some embodiments, the hCG_2002731 polypeptide comprises or consists of:
[0174] KLVRKNIEKDNAGQVTLVPEEPEDMWHTYNLVQVGDSLRASTIRKVQTESSTGSVGSN RVRTTLTLCVEAIDFDSQACQLRVKGTNIQENEYVKMGAYHTIELEPNRQFTLAKKQW DSVVLERIEQACDPAWSADVAAVVMQEGLAHICLVTPSMTLTRAKVEVNIPRKRKGNC SQHDRALERFYEQVVQAIQRHIHFDVVKCILVASPGFVREQFCDYMFQQAVKTDNKLLL ENRSKFLQVHASSGHKYSLKEALCDPTVASRLSDTKAAGEVKALDDFYKMLQHEPDRA FYGLKQVEKANEAMAIDTLLISDELFRHQDVATRSRYVRLVDSVKENAGTVRIFSSLHV SGEQLSQLTGVAAILRFPVPELSDQEGDSSSEED (SEQ ID NO: 135). In some embodiments, the hCG_2002731 polypeptide comprises or consists of:

(SEQ ID NO: 136)
DPAWSADVAAVVMQEGLAHICLVTPSMTLTRAKVEVNIPRKRKGNCSQHD
RALERFYEQVVQAIQRHIHFDVVKCILVASPGFVREQFCDYMFQQAVKTD
NKLLLENRSKFLQVHASSGHKYSLKEALCDPTVASRLSDTKAAGEVKALD
DFYKMLQHEPDRAFYGLKQVEKANEAMAIDTLLISDELFRHQDVATRSRY
VRLVDSVKENAGTVRIFSSLHVSGEQLSQLTGVAAILRFPVPELSDQEGD
SSSEED.

[0175] In some embodiments of the compositions of the disclosure, the second RNA binding protein comprises or consists of an Excision Repair Cross-Complementation Group 1 (ERCC1) polypeptide. In some embodiments, the ERCC1 polypeptide comprises or consists of:

(SEQ ID NO: 137)
MDPGKDKEGVPQPSGPPARKKFVIPLDEDEVPPGVRGNPVLKFVRNVPWE
FGDVIPDYVLGQSTCALFLSLRYHNLHPDYIHGRLQSLGKNFALRVLLVQ
VDVKDPQQALKELAKMCILADCTLILAWSPEEAGRYLETYKAYEQKPADL
LMEKLEQDFVSRVTECLTTVKSVNKTDSQTLLTTFGSLEQLIAASREDLA
LCPGLGPQK.

[0176] In some embodiments of the compositions of the disclosure, the second RNA binding protein comprises or consists of a ras-related C3 botulinum toxin substrate 1 isoform (RAC1) polypeptide. In some embodiments, the RAC1 polypeptide comprises or consists of:

(SEQ ID NO: 138)
KESRAKKFQRQHMDSDSSPSSSSTYCNQMMRRRNMTQGRCKPVNTFVHEP
LVDVQNVCFQEKVTCKNGQGNCYKSNSSMHITDCRLTNGSRYPNCAYRTS
PKERHIIVACEGSPYVPVHFDASVEDST.

[0177] In some embodiments of the compositions of the disclosure, the second RNA binding protein comprises or consists of a Ribonuclease A A1 (RAA1) polypeptide. In some embodiments, the RAA1 polypeptide comprises or consists of:

(SEQ ID NO: 139)
[sequence omitted]

[0178] In some embodiments of the compositions of the disclosure, the second RNA binding protein comprises or consists of a Ras Related Protein (RAB1) polypeptide. In some embodiments, the RAB1 polypeptide comprises or consists of:

(SEQ ID NO: 140)
GLGLVQPSYGQDGMYQRFLRQHVHPEETGGSDRYCNLMMQRRKMTLYHCK
RFNTFIHEDIWNIRSICSTTNIQCKNGKMNCHEGVVKVTDCRDTGSSRAP
NCRYRAIASTRRVVIACEGNPQVPVHFDG.

[0179] In some embodiments of the compositions of the disclosure, the second RNA binding protein comprises or consists of a DNA Replication Helicase/Nuclease 2 (DNA2) polypeptide. In some embodiments, the DNA2 polypeptide comprises or consists of:

(SEQ ID NO: 141)
XSAVDNILLKLAKFKIGFLRLGQIQKVHPAIQQFTEQEICRSKSIKSLAL
LEELYNSQLIVATTCMGINHPIFSRKIFDFCIVDEASQISQPICLGPLFF
SRRFVLVGDHQQLPPLVLNREARALGMSESLFKRLEQNKSAVVQLTVQYR
MNSKIMSLSNKLTYEGKLECGSDKVANAVINLRHFKDVKLELEFYADYSD
NPWLMGVFEPNNPVCFLNTDKVPAPEQVEKGGVSNVTEAKLIVFLTSIFV
KAGCSPSDIGIIAPYRQQLKIINDLLARSIGMVEVNTVDKYQGRDKSIVL
VSFVRSNKDGTVGELLKDWRRLNVAITRAKHKLILLGCVPSLNCYPPLEK
LLNHLNSEKLISFFFCIWSHLIALL.

[0180] In some embodiments of the compositions of the disclosure, the second RNA binding protein comprises or consists of a FLJ35220 polypeptide. In some embodiments, the FLJ35220 polypeptide comprises or consists of:

(SEQ ID NO: 142)
MALRSHDRSTRPLYISVGHRMSLEAAVRLTCCCCRFRIPEPVRQADICSR
EHIRKSLGLPGPPTPRSPKAQRPVACPKGDSGESSALC.

[0181] In some embodiments of the compositions of the disclosure, the second RNA binding protein comprises or consists of a FLJ13173 polypeptide. In some embodiments, the FLJ13173 polypeptide comprises or consists of:

(SEQ ID NO: 143)
CYTNHALSYDQAKRVPRWVLEHISKSKIMGDADRKHCKFKPDPNIPPTFS
AFNEDYVGSGWSRGHMAPAGNNKFSSKAMAETFYLSNIVPQDFDNNSGYW
NRIEMYCRELTERFEDVWVVSGPLTLPQTRGDGKKIVSYQVIGEDNVAVP
SHLYKVILARRSSVSTEPLALGAFVVPNEAIGFQPQLTEFQVSLQDLEKL
SGLVFFPHLDRT.

[0182] In some embodiments of the compositions of the disclosure, the second RNA binding protein comprises or consists of Teneurin Transmembrane Protein (TENM) polypeptide. In some embodiments, the second RNA binding protein comprises or consists of Teneurin Transmembrane Protein 1 (TENM1) polypeptide. In some embodiments, the TENM1 polypeptide comprises or consists of:
[0183] VTVSQMTSVLNGKTRRFADIQLQHGALCFNIRYGTTVEEEKNHVLEIARQRAVAQAWT KEQRRLQEGEEGIRAWTEGEKQQLLSTGRVQGYDGYFVLSVEQYLELSDSANNIHFMR QSEIGRR (SEQ ID NO: 144). In some embodiments, the second RNA binding protein comprises or consists of Teneurin Transmembrane Protein 2 (TENM2) polypeptide. In some embodiments, the TENM2 polypeptide comprises or consists of:

(SEQ ID NO: 145)
TVSQPTLLVNGKTRRFTNIEFQYSTLLLSIRYGLTPDTLDEEKARVLDQA
RQRALGTAWAKEQQKARDGREGSRLWTEGEKQQLLSTGRVQGYEGYYVLP
VEQYPELADSSSNIQFLRQNEMGKR.

[0184] In some embodiments of the compositions of the disclosure, the second RNA binding protein comprises or consists of Ribonuclease Kappa (RNAseK) polypeptide. In some embodiments, the RNAseK polypeptide comprises or consists of:

(SEQ ID NO: 204)
MGWLRPGPRPLCPPARASWAFSHRFPSPLAPRRSPTPFFMASLLCCGPKL
AACGIVLSAWGVIMLIMLGIFFNVHSAVLIEDVPFTEKDFENGPQNIYNL
YEQVSYNCFIAAGLYLLLGGFSFCQVRLNKRKEYMVR.

[0185] In some embodiments of the compositions of the disclosure, the second RNA binding protein comprises or consists of a transcription activator-like effector nuclease (TALEN) polypeptide or a nuclease domain thereof.

[0186] In some embodiments of the compositions of the disclosure, the second RNA binding protein comprises or consists a zinc finger nuclease polypeptide or a nuclease domain thereof. In some embodiments, the second RNA binding protein comprises or consists of a ZNF638 polypeptide or a nuclease domain thereof.

[0187] In some embodiments of the compositions of the disclosure, the second RNA binding protein comprises or consists of a PIN domain derived from the human SMG6 protein, also commonly known as telomerase-binding protein EST1A isoform 3, NCBI Reference Sequence: NP_001243756.1. In some embodiments, the PIN from hSMG6 is used herein in the form of a Cas fusion protein and as an internal control.

### Guide RNA

[0188] The terms guide RNA (gRNA) and single guide RNA (sgRNA) are used interchangeably throughout the disclosure.

[0189] Guide RNAs (gRNAs) of the disclosure may comprise of a spacer sequence and a scaffolding sequence. In some embodiments, a guide RNA is a single guide RNA (sgRNA) comprising a contiguous spacer sequence and scaffolding sequence. In some embodiments, the spacer sequence and the scaffolding sequence are contiguous. In some embodiments, a scaffold sequence comprises a “direct repeat” (DR) sequence. DR sequences refer to the repetitive sequences in the CRISPR locus (naturally-occurring in a bacterial genome or plasmid) that are interspersed with the spacer sequences. It is well known that one would be able to infer the DR sequence of a corresponding Cas protein if the sequence of the associated CRISPR locus is known. In some embodiments, the spacer sequence and the scaffolding sequence are not contiguous. In some embodiments, a sequence encoding a guide RNA of the disclosure comprises or consists of a spacer sequence and a scaffolding sequence, that are separated by a linker sequence. In some embodiments, the linker sequence may comprise or consist of 1, 2, 3, 4, 5, 6, 7, 8, 9, 10, 15, 20, 25, 30, 35, 40, 45, 50 or any number of nucleotides in between. In some embodiments, the linker sequence may comprise at least 1, 2, 3, 4, 5, 6, 7, 8, 9, 10, 15, 20, 25, 30, 35, 40, 45, 50 or any number of nucleotides in between.

[0190] Guide RNAs (gRNAs) of the disclosure may comprise non-naturally occurring nucleotides. In some embodiments, a guide RNA of the disclosure or a sequence encoding the guide RNA comprises or consists of modified or synthetic RNA nucleotides. Exemplary modified RNA nucleotides include, but are not limited to, pseudouridine (Ψ), dihydrouridine (D), inosine (I), and 7-methylguanosine (m7G), hypoxanthine, xanthine, xanthosine, 7-methylguanine, 5, 6-Dihydrouracil, 5-methylcytosine, 5-methylcytidine, 5-hydropxymethylcytosine, isoguanine, and isocytosine.

[0191] Guide RNAs (gRNAs) of the disclosure may bind modified RNA within a target sequence. Within a target sequence, guide RNAs (gRNAs) of the disclosure may bind modified RNA. Exemplary epigenetically or post-transcriptionally modified RNA include, but are not limited to, 2′-O-Methylation (2′-OMe) (2′-O-methylation occurs on the oxygen of the free 2′-OH of the ribose moiety), N6-methyladenosine (m6A), and 5-methylcytosine (m5C).

[0192] In some embodiments of the compositions of the disclosure, a guide RNA of the disclosure comprises at least one sequence encoding a non-coding C/D box small nucleolar RNA (snoRNA) sequence. In some embodiments, the snoRNA sequence comprises at least one sequence that is complementary to the target RNA, wherein the target sequence of the RNA molecule comprises at least one 2′-OMe. In some embodiments, the snoRNA sequence comprises at least one sequence that is complementary to the target RNA, wherein the at least one sequence that is complementary to the target RNA comprises a box C motif (RUGAUGA) and a box D motif (CUGA).

[0193] Spacer sequences of the disclosure bind to the target sequence of an RNA molecule. Spacer sequences of the disclosure may comprise a CRISPR RNA (crRNA). Spacer sequences of the disclosure comprise or consist of a sequence having sufficient complementarity to a target sequence of an RNA molecule to bind selectively to the target sequence. Upon binding to a target sequence of an RNA molecule, the spacer sequence may guide one or more of a scaffolding sequence and a fusion protein to the RNA molecule. In some embodiments, a sequence having sufficient complementarity to a target sequence of an RNA molecule to bind selectively to the target sequence has at least 50%, 55%, 60%, 65%, 70%, 75%, 80%, 85%, 90%, 95%, 96, 97%, 98%, 99%, or any percentage identity in between to the target sequence. In some embodiments, a sequence having sufficient complementarity to a target sequence of an RNA molecule to bind selectively to the target sequence has 100% identity the target sequence.

[0194] Scaffolding sequences of the disclosure bind the first RNA-binding polypeptide of the disclosure. Scaffolding sequences of the disclosure may comprise a trans acting RNA (tracrRNA). Scaffolding sequences of the disclosure comprise or consist of a sequence having sufficient complementarity to a target sequence of an RNA molecule to bind selectively to the target sequence. Upon binding to a target sequence of an RNA molecule, the scaffolding sequence may guide a fusion protein to the RNA molecule. In some embodiments, a sequence having sufficient complementarity to a target sequence of an RNA molecule to bind selectively to the target sequence has at least 50%, 55%, 60%, 65%, 70%, 75%, 80%, 85%, 90%, 95%, 96, 97%, 98%, 99%, or any percentage identity in between to the target sequence. In some embodiments, a sequence having sufficient complementarity to a target sequence of an RNA molecule to bind selectively to the target sequence has 100% identity the target sequence. Alternatively, or in addition, in some embodiments, scaffolding sequences of the disclosure comprise or consist of a sequence that binds to a first RNA binding protein or a second RNA binding protein of a fusion protein of the disclosure. In some embodiments, scaffolding sequences of the disclosure comprise a secondary structure or a tertiary structure. Exemplary secondary structures include, but are not limited to, a helix, a stem loop, a bulge, a tetraloop and a pseudoknot. Exemplary tertiary structures include, but are not limited to, an A-form of a helix, a B-form of a helix, and a Z-form of a helix. Exemplary tertiary structures include, but are not limited to, a twisted or helicized stem loop. Exemplary tertiary structures include, but are not limited to, a twisted or helicized pseudoknot. In some embodiments, scaffolding sequences of the disclosure comprise at least one secondary structure or at least one tertiary structure. In some embodiments, scaffolding sequences of the disclosure comprise one or more secondary structure(s) or one or more tertiary structure(s).

[0195] In some embodiments of the compositions of the disclosure, a guide RNA or a portion thereof selectively binds to a tetraloop motif in an RNA molecule of the disclosure. In some embodiments, a target sequence of an RNA molecule comprises a tetraloop motif. In some embodiments, the tetraloop motif is a “GRNA” motif comprising or consisting of one or more of the sequences of GAAA, GUGA, GCAA or GAGA.

[0196] In some embodiments of the compositions of the disclosure, a guide RNA or a portion thereof that binds to a target sequence of an RNA molecule hybridizes to the target sequence of the RNA molecule. In some embodiments, a guide RNA or a portion thereof that binds to a first RNA binding protein or to a second RNA binding protein covalently binds to the first RNA binding protein or to the second RNA binding protein. In some embodiments, a guide RNA or a portion thereof that binds to a first RNA binding protein or to a second RNA binding protein non-covalently binds to the first RNA binding protein or to the second RNA binding protein.

[0197] In some embodiments of the compositions of the disclosure, a guide RNA or a portion thereof comprises or consists of between 10 and 100 nucleotides, inclusive of the endpoints. In some embodiments, a spacer sequence of the disclosure comprises or consists of between 10 and 30 nucleotides, inclusive of the endpoints. In some embodiments, a scaffold sequence of the disclosure comprises or consists of 15, 16, 17, 18, 19, 20, 21, 22, 23, 24, 25, 26, 27, 28, 29 or 30 nucleotides. In some embodiments, the spacer sequence of the disclosure comprises or consists of 20 nucleotides. In some embodiments, the spacer sequence of the disclosure comprises or consists of 21 nucleotides. In some embodiments, a scaffold sequence of the disclosure comprises or consists of between 10 and 100 nucleotides, inclusive of the endpoints. In some embodiments, a scaffold sequence of the disclosure comprises or consists of 30, 35, 40, 45, 50, 55, 60, 65, 70, 76, 80, 87, 90, 95, 100 or any number of nucleotides in between. In some embodiments, the scaffold sequence of the disclosure comprises or consists of between 85 and 95 nucleotides, inclusive of the endpoints. In some embodiments, the scaffold sequence of the disclosure comprises or consists of 85 nucleotides. In some embodiments, the scaffold sequence of the disclosure comprises or consists of 90 nucleotides. In some embodiments, the scaffold sequence of the disclosure comprises or consists of 93 nucleotides.

[0198] In some embodiments of the compositions of the disclosure, a guide RNA or a portion thereof not comprise a nuclear localization sequence (NLS).

[0199] In some embodiments of the compositions of the disclosure, a guide RNA or a portion thereof not comprise a sequence complementary to a protospacer adjacent motif (PAM).

[0200] Therapeutic or pharmaceutical compositions of the disclosure do not comprise a PAMmer oligonucleotide. In other embodiments, optionally, non-therapeutic or non-pharmaceutical compositions may comprise a PAMmer oligonucleotide. The term “PAMmer” refers to an oligonucleotide comprising a PAM sequence that is capable of interacting with a guide nucleotide sequence-programmable RNA binding protein. Non-limiting examples of PAMmers are described in O'Connell et al. Nature 516, pages 263-266 (2014), incorporated herein by reference. A PAM sequence refers to a protospacer adjacent motif comprising about 2 to about 10 nucleotides. PAM sequences are specific to the guide nucleotide sequence-programmable RNA binding protein with which they interact and are known in the art. For example, Streptococcus pyogenes PAM has the sequence 5′-NGG-3′, where “N” is any nucleobase followed by two guanine (“G”) nucleobases. Cas9 of Francisella novicida recognizes the canonical PAM sequence 5′-NGG-3′, but has been engineered to recognize the PAM 5′-YG-3′ (where “Y” is a pyrimidine), thus adding to the range of possible Cas9 targets. The Cpf1 nuclease of Francisella novicida recognizes the PAM 5′-TTTN-3′ or 5′-YTN-3′.

[0201] In some embodiments of the compositions of the disclosure, a guide RNA or a portion thereof comprises a sequence complementary to a protospacer flanking sequence (PFS). In some embodiments, including those wherein a guide RNA or a portion thereof comprises a sequence complementary to a PFS, the first RNA binding protein may comprise a sequence isolated or derived from a Cas13 protein. In some embodiments, including those wherein a guide RNA or a portion thereof comprises a sequence complementary to a PFS, the first RNA binding protein may comprise a sequence encoding a Cas13 protein or an RNA-binding portion thereof. In some embodiments, the guide RNA or a portion thereof does not comprise a sequence complementary to a PFS.

[0202] In some embodiments of the compositions of the disclosure, a guide RNA sequence of the disclosure comprises a promoter to drive expression of the guide RNA. In some embodiments, a vector comprising a guide RNA sequence of the disclosure comprises a promoter to drive expression of the guide RNA. In some embodiments, the promoter is a constitutive promoter. In some embodiments, a promoter is a tissue-specific and/or cell-type specific promoter. In some embodiments, a promoter is an inducible promoter. In some embodiments, a promoter is a hybrid or a recombinant promoter. In some embodiments, a promoter is a promoter capable of driving expression in a mammalian cell. In some embodiments, a promoter is a promoter capable of expression in a human cell. In some embodiments, a promoter is a promoter capable of expressing the guide RNA sequence and restricting the expression to the nucleus of the cell. In some embodiments, a promoter is a human RNA polymerase promoter or a promoter sequence isolated or derived from a a human RNA polymerase promoter. In some embodiments, a promoter is a U6 promoter or a sequence isolated or derived from a sequence encoding a U6 promoter. In some embodiments, a promoter is a human tRNA promoter or a promoter sequence isolated or derived from a sequence a human tRNA promoter. In some embodiments, a promoter is a human valine tRNA promoter or a promoter sequence isolated or derived from a human valine tRNA promoter.

[0203] In some embodiments of the compositions of the disclosure, a promoter further comprises a regulatory element. In some embodiments, a vector comprising a promoter which further comprises a regulatory element. In some embodiments, a regulatory element enhances expression of the guide RNA. Exemplary regulatory elements include, but are not limited to, an enhancer element, an intron, an exon, or a combination thereof.

[0204] In some embodiments of the compositions of the disclosure, a vector of the disclosure comprises one or more of a guide RNA sequence, a promoter to drive expression of the guide RNA and a regulatory element to enhance expression of the guide RNA. In some embodiments of the compositions of the disclosure, the vector further comprises a nucleic acid sequence encoding a fusion protein of the disclosure.

### Fusion Proteins

[0205] Fusion proteins of the disclosure comprise a first RNA binding protein and a second RNA binding protein. In some embodiments, along a sequence encoding the fusion protein, the sequence encoding the first RNA binding protein is positioned 5′ of the sequence encoding the second RNA binding protein. In some embodiments, along a sequence encoding the fusion protein, the sequence encoding the first RNA binding protein is positioned 3′ of the sequence encoding the second RNA binding protein.

[0206] In some embodiments of the compositions of the disclosure, the sequence encoding the first RNA binding protein comprises a sequence isolated or derived from a protein capable of binding an RNA molecule. In some embodiments, the sequence encoding the first RNA binding protein comprises a sequence isolated or derived from a protein capable of selectively binding an RNA molecule and not binding a DNA molecule, a mammalian DNA molecule or any DNA molecule. In some embodiments, the sequence encoding the first RNA binding protein comprises a sequence isolated or derived from a protein capable of binding an RNA molecule and inducing a break in the RNA molecule. In some embodiments, the sequence encoding the first RNA binding protein comprises a sequence isolated or derived from a protein capable of binding an RNA molecule, inducing a break in the RNA molecule, and not binding a DNA molecule, a mammalian DNA molecule or any DNA molecule. In some embodiments, the sequence encoding the first RNA binding protein comprises a sequence isolated or derived from a protein capable of binding an RNA molecule, inducing a break in the RNA molecule, and neither binding nor inducing a break in a DNA molecule, a mammalian DNA molecule or any DNA molecule.

[0207] In some embodiments of the compositions of the disclosure, the sequence encoding the first RNA binding protein comprises a sequence isolated or derived from a protein with no DNA nuclease activity.

[0208] In some embodiments of the compositions of the disclosure, the sequence encoding the first RNA binding protein comprises a sequence isolated or derived from a protein having DNA nuclease activity, wherein the DNA nuclease activity does not induce a break in a DNA molecule, a mammalian DNA molecule or any DNA molecule when a composition of the disclosure is contacted to an RNA molecule or introduced into a cell or into a subject of the disclosure.

[0209] In some embodiments of the compositions of the disclosure, the sequence encoding the first RNA binding protein comprises a sequence isolated or derived from a protein having DNA nuclease activity, wherein the DNA nuclease activity is inactivated and wherein the DNA nuclease activity does not induce a break in a DNA molecule, a mammalian DNA molecule or any DNA molecule when a composition of the disclosure is contacted to an RNA molecule or introduced into a cell or into a subject of the disclosure. In some embodiments, the sequence encoding the first RNA binding protein comprises a mutation that inactivates or decreases the DNA nuclease activity to a level at which the DNA nuclease activity does not induce a break in a DNA molecule, a mammalian DNA molecule or any DNA molecule when a composition of the disclosure is contacted to an RNA molecule or introduced into a cell or into a subject of the disclosure. In some embodiments, the sequence encoding the first RNA binding protein comprises a mutation that inactivates or decreases the DNA nuclease activity and the mutation comprises one or more of a substitution, inversion, transposition, insertion, deletion, or any combination thereof to a nucleic acid sequence or amino acid sequence encoding the first RNA binding protein or a nuclease domain thereof.

[0210] In some embodiments of the compositions of the disclosure, the sequence encoding the first RNA binding protein of an RNA-guided fusion protein disclosed herein comprises a sequence isolated or derived from a CRISPR Cas protein. In some embodiments, the CRISPR Cas protein comprises a Type II CRISPR Cas protein. In some embodiments, the Type II CRISPR Cas protein comprises a Cas9 protein. Exemplary Cas9 proteins of the disclosure may be isolated or derived from any species, including, but not limited to, a bacteria or an archaea. Exemplary Cas9 proteins of the disclosure may be isolated or derived from any species, including, but not limited to, Streptococcus pyogenes, Haloferax mediteranii, Mycobacterium tuberculosis, Francisella tularensis subsp. novicida, Pasteurella multocida, Neisseria meningitidis, Campylobacter jejune, Streptococcus thermophilus, Campylobacter lari CF89-12, Mycoplasma gallisepticum str. F, Nitratifractor salsuginis str. DSM 16511, Parvibaculum lavamentivorans, Roseburia intestinalis, Neisseria cinerea, a Gluconacetobacter diazotrophicus, an Azospirillum B510, a Sphaerochaeta globus str. Buddy, Flavobacterium columnare, Fluviicola taffensis, Bacteroides coprophilus, Mycoplasma mobile, Lactobacillus farciminis, Streptococcus pasteurianus, Lactobacillus johnsonii, Staphylococcus pseudintermedius, Filifactor alocis, Treponema denticola, Legionella pneumophila str. Paris, Sutterella wadsworthensis, Corynebacter diphtherias, Streptococcus aureus, and Francisella novicida.

[0211] Exemplary wild type S. pyogenes Cas9 proteins of the disclosure may comprise or consist of the amino acid sequence:

| (SEQ ID NO: 147) | |
|---|---|
| 1 | MDKKYSIGLD IGTNSVGWAV ITDEYKVPSK KFKVLGNTDR HSIKKNLIGA LLFDSGETAE |
| 61 | ATRLKRTARR RYTRRKNRIC YLQEIFSNEM AKVDDSFFHR LEESFLVEED KKHERHPIFG |
| 121 | NIVDEVAYHE KYPTIYHLRK KLVDSTDKAD LRLIYLALAH MIKFRGHFLI EGDLNPDNSD |
| 181 | VDKLFIQLVQ TYNQLFEENP INASGVDAKA ILSARLSKSR RLENLIAQLP GEKKNGLFGN |
| 241 | LIALSLGLTP NFKSNFDLAE DAKLQLSKDT YDDDLDNLLA QIGDQYADLF LAAKNLSDAI |
| 301 | LLSDILRVNT EITKAPLSAS MIKRYDEHHQ DLTLLKALVR QQLPEKYKEI FFDQSKNGYA |
| 361 | GYIDGGASQE EFYKFIKPIL EKMDGTEELL VKLNREDLLR KQRTFDNGSI PHQIHLGELH |
| 421 | AILRRQEDFY PFLKDNREKI EKILTFRIPY YVGPLARGNS RFAWMTRKSE ETITPWNFEE |
| 481 | VVDKGASAQS FIERMTNFDK NLPNEKVLPK HSLLYEYFTV YNELTKVKYV TEGMRKPAFL |
| 541 | SGEQKKAIVD LLFKTNRKVT VKQLKEDYFK KIECFDSVEI SGVEDRFNAS LGTYHDLLKI |
| 601 | IKDKDFLDNE ENEDILEDIV LTLTLFEDRE MIEERLKTYA HLFDDKVMKQ LKRRRYTGWG |
| 661 | RLSRKLINGI RDKQSGKTIL DFLKSDGFAN RNFMQLIHDD SLTFKEDIQK AQVSGQGDSL |
| 721 | HEHIANLAGS PAIKKGILQT VKVVDELVKV MGRHKPENIV IEMARENQTT QKGQKNSRER |
| 781 | MKRIEEGIKE LGSQILKEHP VENTQLQNEK LYLYYLQNGR DMYVDQELDI NRLSDYDVDH |
| 841 | IVPQSFLKDD SIDNKVLTRS DKNRGKSDNV PSEEVVKKMK NYWRQLLNAK LITQRKFDNL |
| 901 | TKAERGGLSE LDKAGFIKRQ LVETRQITKH VAQILDSRMN TKYDENDKLI REVKVITLKS |
| 961 | KLVSDFRKDF QFYKVREINN YHHAHDAYLN AVVGTALIKK YPKLESEFVY GDYKVYDVRK |
| 1021 | MIAKSEQEIG KATAKYFFYS NIMNFFKTEI TLANGEIRKR PLIETNGETG EIVWDKGRDF |
| 1081 | ATVRKVLSMP QVNIVKKTEV QTGGFSKESI LPKRNSDKLI ARKKDWDPKK YGGFDSPTVA |
| 1141 | YSVLVVAKVE KGKSKKLKSV KELLGITIME RSSFEKNPID FLEAKGYKEV KKDLIIKLPK |
| 1201 | YSLFELENGR KRMLASAGEL QKGNELALPS KYVNFLYLAS HYEKLKGSPE DNEQKQLFVE |
| 1261 | QHKHYLDEII EQISEFSKRV ILADANLDKV LSAYNKHRDK PIREQAENII HLFTLTNLGA |
| 1321 | PAAFKYFDTT IDRKRYTSTK EVLDATLIHQ SITGLYETRI DLSQLGGD. |

[0212] Nuclease inactivated S. pyogenes Cas9 proteins may comprise a substitution of an Alanine (A) for a Aspartic Acid (D) at position 10 and an alanine (A) for a Histidine (H) at position 840. Exemplary nuclease inactivated S. pyogenes Cas9 proteins of the disclosure may comprise or consist of the amino acid sequence (D10A and H840A bolded and underlined):

| (SEQ ID NO: 148) | |
|---|---|
| 1 | MDKKYSIGLA IGTNSVGWAV ITDEYKVPSK KFKVLGNTDR HSIKKNLIGA LLFDSGETAE |
| 61 | ATRLKRTARR RYTRRKNRIC YLQEIFSNEM AKVDDSFFHR LEESFLVEED KKHERHPIFG |
| 121 | NIVDEVAYHE KYPTIYHLRK KLVDSTDKAD LRLIYLALAH MIKFRGHFLI EGDLNPDNSD |
| 181 | VDKLFIQLVQ TYNQLFEENP INASGVDAKA ILSARLSKSR RLENLIAQLP GEKKNGLFGN |
| 241 | LIALSLGLTP NFKSNFDLAE DAKLQLSKDT YDDDLDNLLA QIGDQYADLF LAAKNLSDAI |
| 301 | LLSDILRVNT EITKAPLSAS MIKRYDEHHQ DLTLLKALVR QQLPEKYKEI FFDQSKNGYA |
| 361 | GYIDGGASQE EFYKFIKPIL EKMDGTEELL VKLNREDLLR KQRTFDNGSI PHQIHLGELH |
| 421 | AILRRQEDFY PFLKDNREKI EKILTFRIPY YVGPLARGNS RFAWMTRKSE ETITPWNFEE |
| 481 | VVDKGASAQS FIERMTNFDK NLPNEKVLPK HSLLYEYFTV YNELTKVKYV TEGMRKPAFL |
| 541 | SGEQKKAIVD LLFKTNRKVT VKQLKEDYFK KIECFDSVEI SGVEDRFNAS LGTYHDLLKI |
| 601 | IKDKDFLDNE ENEDILEDIV LTLTLFEDRE MIEERLKTYA HLFDDKVMKQ LKRRRYTGWG |
| 661 | RLSRKLINGI RDKQSGKTIL DFLKSDGFAN RNFMQLIHDD SLTFKEDIQK AQVSGQGDSL |
| 721 | HEHIANLAGS PAIKKGILQT VKVVDELVKV MGRHKPENIV IEMARENQTT QKGQKNSRER |
| 781 | MKRIEEGIKE LGSQILKEHP VENTQLQNEK LYLYYLQNGR DMYVDQELDI NRLSDYDVDA |
| 841 | IVPQSFLKDD SIDNKVLTRS DKNRGKSDNV PSEEVVKKMK NYWRQLLNAK LITQRKFDNL |
| 901 | TKAERGGLSE LDKAGFIKRQ LVETRQITKH VAQILDSRMN TKYDENDKLI REVKVITLKS |
| 961 | KLVSDFRKDF QFYKVREINN YHHAHDAYLN AVVGTALIKK YPKLESEFVY GDYKVYDVRK |
| 1021 | MIAKSEQEIG KATAKYFFYS NIMNFFKTEI TLANGEIRKR PLIETNGETG EIVWDKGRDF |
| 1081 | ATVRKVLSMP QVNIVKKTEV QTGGFSKESI LPKRNSDKLI ARKKDWDPKK YGGFDSPTVA |
| 1141 | YSVLVVAKVE KGKSKKLKSV KELLGITIME RSSFEKNPID FLEAKGYKEV KKDLIIKLPK |
| 1201 | YSLFELENGR KRMLASAGEL QKGNELALPS KYVNFLYLAS HYEKLKGSPE DNEQKQLFVE |
| 1261 | QHKHYLDEII EQISEFSKRV ILADANLDKV LSAYNKHRDK PIREQAENII HLFTLTNLGA |
| 1321 | PAAFKYFDTT IDRKRYTSTK EVLDATLIHQ SITGLYETRI DLSQLGGD. |

[0213] Nuclease inactivated S. pyogenes Cas9 proteins may comprise deletion of a RuvC nuclease domain or a portion thereof, an HNH domain, a DNAse active site, a ββα-metal fold or a portion thereof comprising a DNAse active site or any combination thereof.

[0214] Other exemplary Cas9 proteins or portions thereof may comprise or consist of the following amino acid sequences.

[0215] In some embodiments the Cas9 protein can be S. pyogenes Cas9 and may comprise or consist of the amino acid sequence:

(SEQ ID NO: 149)
MDKKYSIGLDIGTNSVGWAVITDEYKVPSKKFKVLGNTDRHSIKKNLIGA
LLFDSGETAEATRLKRTARRRYTRRKNRICYLQEIFSNEMAKVDDSFFHR
LEESFLVEEDKKHERHPIFGNIVDEVAYHEKYPTIYHLRKKLVDSTDKAD
LRLIYLALAHMIKFRGHFLIEGDLNPDNSDVDKLFIQLVQTYNQLFEENP
INASGVDAKAILSARLSKSRRLENLIAQLPGEKKNGLFGNLIALSLGLTP
NFKSNFDLAEDAKLQLSKDTYDDDLDNLLAQIGDQYADLFLAAKNLSDAI
LLSDILRVNTEITKAPLSASMIKRYDEHHQDLTLLKALVRQQLPEKYKEI
FFDQSKNGYAGYIDGGASQEEFYKFIKPILEKMDGTEELLVKLNREDLLR
KQRTFDNGSIPHQIHLGELHAILRRQEDFYPFLKDNREKIEKILTFRIPY
YVGPLARGNSRFAWMTRKSEETITPWNFEEVVDKGASAQSFIERMTNFDK
NLPNEKVLPKHSLLYEYFTVYNELTKVKYVIEGMRKPAFLSGEQKKAIVD
LLFKTNRKVTVKQLKEDYFKKIECFDSVEISGVEDRFNASLGTYHDLLKI
IKDKDFLDNEENEDILEDIVLTLTLFEDREMIEERLKTYAHLFDDKVMKQ
LKRRRYTGWGRLSRKLINGIRDKQSGKTILDFLKSDGFANRNFMQLIHDD
SLTFKEDIQKAQVSGQGDSLHEHIANLAGSPAIKKGILQTVKVVDELVKV
MGRHKPENIVIEMARENQTTQKGQKNSRERMKRIEEGIKELGSQILKEHP
VENTQLQNEKLYLYYLQNGRDMYVDQELDINRLSDYDVDHIVPQSFLKDD
SIDNKVLTRSDKNRGKSDNVPSEEVVKKMKNYWRQLLNAKLITQRKFDNL
TKAERGGLSELDKAGFIKRQLVETRQITKHVAQILDSRMNTKYDENDKLI
REVKVITLKSKLVSDFRKDFQFYKVREINNYHHAHDAYLNAVVGTALIKK
YPKLESEFVYGDYKVYDVRKMIAKSEQEIGKATAKYFFYSNIMNFFKTEI
TLANGEIRKRPLIETNGETGEIVVVDKGRDFATVRKVLSMPQVNIVKKTE
VQTGGFSKESILPKRNSDKLIARKKDWDPKKYGGFDSPTVAYSVLVVAKV
EKGKSKKLKSVKELLGITIMERSSFEKNPIDFLEAKGYKEVKKDLIIKLP
KYSLFELENGRKRMLASAGELQKGNELALPSKYVNFLYLASHYEKLKGSP
EDNEQKQLFVEQHKHYLDEIIEQISEFSKRVILADANLDKVLSAYNKHRD
KPIREQAENIIHLFTLTNLGAPAAFKYFDTTIDRKRYTSTKEVLDATLIH
QSITGLYETRIDLSQLGGD

[0216] In some embodiments the Cas9 protein can be S. aureus Cas9 and may comprise or consist of the amino acid sequence:

(SEQ ID NO: 150)
MKRNYILGLDIGITSVGYGIIDYETRDVIDAGVRLFKEANVENNEGRRSK
RGARRLKRRRRHRIQRVKKLLFDYNLLTDHSELSGINPYEARVKGLSQKL
SEEEFSAALLHLAKRRGVHNVNEVEEDTGNELSTKEQISRNSKALEEKYV
AELQLERLKKDGEVRGSINRFKTSDYVKEAKQLLKVQKAYHQLDQSFIDT
YIDLLETRRTYYEGPGEGSPFGWKDIKEWYEMLMGHCTYFPEELRSVKYA
YNADLYNALNDLNNLVITRDENEKLEYYEKFQIIENVFKQKKKPTLKQIA
KEILVNEEDIKGYRVTSTGKPEFTNLKVYHDIKDITARKEIIENAELLDQ
IAKILTIYQSSEDIQEELTNLNSELTQEEIEQISNLKGYTGTHNLSLKAI
NLILDELWHTNDNQIAIFNRLKLVPKKVDLSQQKEIPTTLVDDFILSPVV
KRSFIQSIKVINAIIKKYGLPNDIIIELAREKNSKDAQKMINEMQKRNRQ
TNERIEEIIRTTGKENAKYLIEKIKLHDMQEGKCLYSLEAIPLEDLLNNP
FNYEVDHIIPRSVSFDNSFNNKVLVKQEENSKKGNRTPFQYLSSSDSKIS
YETFKKHILNLAKGKGRISKTKKEYLLEERDINRFSVQKDFINRNLVDTR
YATRGLMNLLRSYFRVNNLDVKVKSINGGFTSFLRRKWKFKKERNKGYKH
HAEDALIIANADFIFKEWKKLDKAKKVMENQMFEEKQAESMPEIETEQEY
KEIFITPHQIKHIKDFKDYKYSHRVDKKPNRELINDTLYSTRKDDKGNTL
IVNNLNGLYDKDNDKLKKLINKSPEKLLMYHHDPQTYQKLKLIMEQYGDE
KNPLYKYYEETGNYLTKYSKKDNGPVIKKIKYYGNKLNAHLDITDDYPNS
RNKVVKLSLKPYRFDVYLDNGVYKFVTVKNLDVIKKENYYEVNSKCYEEA
KKLKKISNQAEFIASFYNNDLIKINGELYRVIGVNNDLLNRIEVNMIDIT
YREYLENMNDKRPPRIIKTIASKTQSIKKYSTDILGNLYEVKSKKHPQII
KKG

[0217] In some embodiments the Cas9 protein can be S. thermophiles CRISPR1 Cas9 and may comprise or consist of the amino acid sequence:

(SEQ ID NO: 151)
MSDLVLGLDIGIGSVGVGILNKVTGEIIHKNSRIFPAAQAENNLVRRTNR
QGRRLARRKKHRRVRLNRLFEESGLITDFTKISINLNPYQLRVKGLTDEL
SNEELFIALKNMVKHRGISYLDDASDDGNSSVGDYAQIVKENSKQLETKT
PGQIQLERYQTYGQLRGDFTVEKDGKKHRLINVFPTSAYRSEALRILQTQ
QEFNPQITDEFINRYLEILTGKRKYYHGPGNEKSRTDYGRYRTSGETLDN
IFGILIGKCTFYPDEFRAAKASYTAQEFNLLNDLNNLTVPTETKKLSKEQ
KNQIINYVKNEKAMGPAKLFKYIAKLLSCDVADIKGYRIDKSGKAEIHTF
EAYRKMKTLETLDIEQMDRETLDKLAYVLTLNTEREGIQEALEHEFADGS
FSQKQVDELVQFRKANSSIFGKGWHNFSVKLMMELIPELYETSEEQMTIL
TRLGKQKTTSSSNKTKYIDEKLLTEEIYNPVVAKSVRQAIKIVNAAIKEY
GDFDNIVIEMARETNEDDEKKAIQKIQKANKDEKDAAMLKAANQYNGKAE
LPHSVFHGHKQLATKIRLWHQQGERCLYTGKTISIHDLINNSNQFEVDHI
LPLSITFDDSLANKVLVYATANQEKGQRTPYQALDSMDDAWSFRELKAFV
RESKTLSNKKKEYLLTEEDISKFDVRKKFIERNLVDTRYASRVVLNALQE
HFRAHKIDTKVSVVRGQFTSQLRRHWGIEKTRDTYHHHAVDALIIAASSQ
LNLWKKQKNTLVSYSEDQLLDIETGELISDDEYKESVFKAPYQHFVDTLK
SKEFEDSILFSYQVDSKFNRKISDATIYATRQAKVGKDKADETYVLGKIK
DIYTQDGYDAFMKIYKKDKSKFLMYRHDPQTFEKVIEPILENYPNKQIND
KGKEVPCNPFLKYKEEHGYIRKYSKKGNGPEIKSLKYYDSKLGNHIDITP
KDSNNKVVLQSVSPWRADVYFNKTTGKYEILGLKYADLQFDKGTGTYKIS
QEKYNDIKKKEGVDSDSEFKFTLYKNDLLLVKDTETKEQQLFRFLSRTMP
KQKHYVELKPYDKQKFEGGEALIKVLGNVANSGQCKKGLGKSNISIYKVR
TDVLGNQHIIKNEGDKPKLDF.

[0218] In some embodiments the Cas9 protein can be N. meningitidis Cas9 and may comprise or consist of the amino acid sequence:

(SEQ ID NO: 152)
MAAFKPNPINYILGLDIGIASVGWAMVEIDEDENPICLIDLGVRVFERAE
VPKTGDSLAMARRLARSVRRLTRRRAHRLLRARRLLKREGVLQAADFDEN
GLIKSLPNTPWQLRAAALDRKLTPLEWSAVLLHLIKHRGYLSQRKNEGET
ADKELGALLKGVADNAHALQTGDFRTPAELALNKFEKESGHIRNQRGDYS
HTFSRKDLQAELILLFEKQKEFGNPHVSGGLKEGIETLLMTQRPALSGDA
VQKMLGHCTFEPAEPKAAKNTYTAERFIWLTKLNNLRILEQGSERPLTDT
ERATLMDEPYRKSKLTYAQARKLLGLEDTAFFKGLRYGKDNAEASTLMEM
KAYHAISRALEKEGLKDKKSPLNLSPELQDEIGTAFSLFKTDEDITGRLK
DRIQPEILEALLKHISFDKFVQISLKALRRIVPLMEQGKRYDEACAEIYG
DHYGKKNTEEKIYLPPIPADEIRNPVVLRALSQARKVINGVVRRYGSPAR
IHIETAREVGKSFKDRKEIEKRQEENRKDREKAAAKFREYFPNFVGEPKS
KDILKLRLYEQQHGKCLYSGKEINLGRLNEKGYVEIDHALPFSRTWDDSF
NNKVLVLGSENQNKGNQTPYEYFNGKDNSREWQEFKARVETSRFPRSKKQ
RILLQKFDEDGFKERNLNDTRYVNRFLCQFVADRMRLTGKGKKRVFASNG
QITNLLRGFWGLRKVRAENDRHHALDAVVVACSTVAMQQKITRFVRYKEM
NAFDGKTIDKETGEVLHQKTHFPQPWEFFAQEVMIRVFGKPDGKPEFEEA
DTPEKLRTLLAEKLSSRPEAVHEYVTPLFVSRAPNRKMSGQGHMETVKSA
KRLDEGVSVLRVPLTQLKLKDLEKMVNREREPKLYEALKARLEAHKDDPA
KAFAEPFYKYDKAGNRTQQVKAVRVEQVQKTGVVVVRNHNGIADNATMVR
VDVFEKGDKYYLVPIYSWQVAKGILPDRAVVQGKDEEDWQLIDDSFNFKF
SLHPNDLVEVITKKARMFGYFASCHRGTGNINIRIHDLDHKIGKNGILEG
IGVKTALSFQKYQIDELGKEIRPCRLKKRPPVR.

[0219] In some embodiments the Cas9 protein can be Parvibaculum. lavamentivorans Cas9 and may comprise or consist of the amino acid sequence:

(SEQ ID NO: 153)
MERIFGFDIGTTSIGFSVIDYSSTQSAGNIQRLGVRIFPEARDPDGTPLN
QQRRQKRMMRRQLRRRRIRRKALNETLHEAGFLPAYGSADWPVVMADEPY
ELRRRGLEEGLSAYEFGRAIYHLAQHRHFKGRELEESDTPDPDVDDEKEA
ANERAATLKALKNEQTTLGAWLARRPPSDRKRGIHAHRNVVAEEFERLWE
VQSKFHPALKSEEMRARISDTIFAQRPVFWRKNTLGECRFMPGEPLCPKG
SWLSQQRRMLEKLNNLAIAGGNARPLDAEERDAILSKLQQQASMSWPGVR
SALKALYKQRGEPGAEKSLKFNLELGGESKLLGNALEAKLADMFGPDWPA
HPRKQEIRHAVHERLWAADYGETPDKKRVIILSEKDRKAHREAAANSFVA
DFGITGEQAAQLQALKLPTGWEPYSIPALNLFLAELEKGERFGALVNGPD
WEGWRRTNFPHRNQPTGEILDKLPSPASKEERERISQLRNPTVVRTQNEL
RKVVNNLIGLYGKPDRIRIEVGRDVGKSKREREEIQSGIRRNEKQRKKAT
EDLIKNGIANPSRDDVEKWILWKEGQERCPYTGDQIGFNALFREGRYEVE
HIWPRSRSFDNSPRNKTLCRKDVNIEKGNRMPFEAFGHDEDRWSAIQIRL
QGMVSAKGGTGMSPGKVKRFLAKTMPEDFAARQLNDTRYAAKQILAQLKR
LWPDMGPEAPVKVEAVTGQVTAQLRKLWTLNNILADDGEKTRADHRHHAI
DALTVACTHPGMTNKLSRYWQLRDDPRAEKPALTPPWDTIRADAEKAVSE
IVVSHRVRKKVSGPLHKETTYGDTGTDIKTKSGTYRQFVTRKKIESLSKG
ELDEIRDPRIKEIVAAHVAGRGGDPKKAFPPYPCVSPGGPEIRKVRLTSK
QQLNLMAQTGNGYADLGSNHHIAIYRLPDGKADFEIVSLFDASRRLAQRN
PIVQRTRADGASFVMSLAAGEAIMIPEGSKKGIWIVQGVVVASGQVVLER
DTDADHSTTTRPMPNPILKDDAKKVSIDPIGRVRPSND.

[0220] In some embodiments the Cas9 protein can be Corynebacter diphtheria Cas9 and may comprise or consist of the amino acid sequence:

(SEQ ID NO: 154)
MKYHVGIDVGTFSVGLAAIEVDDAGMPIKTLSLVSHIHDSGLDPDEIKSA
VTRLASSGIARRTRRLYRRKRRRLQQLDKFIQRQGWPVIELEDYSDPLYP
WKVRAELAASYIADEKERGEKLSVALRHIARHRGWRNPYAKVSSLYLPDG
PSDAFKAIREEIKRASGQPVPETATVGQMVTLCELGTLKLRGEGGVLSAR
LQQSDYAREIQEICRMQEIGQELYRKIIDVVFAAESPKGSASSRVGKDPL
QPGKNRALKASDAFQRYRIAALIGNLRVRVDGEKRILSVEEKNLVFDHLV
NLTPKKEPEWVTIAEILGIDRGQLIGTATMTDDGERAGARPPTHDTNRSI
VNSRIAPLVDWWKTASALEQHAMVKALSNAEVDDFDSPEGAKVQAFFADL
DDDVHAKLDSLHLPVGRAAYSEDTLVRLTRRMLSDGVDLYTARLQEFGIE
PSWTPPTPRIGEPVGNPAVDRVLKTVSRWLESATKTWGAPERVIIEHVRE
GFVTEKRAREMDGDMRRRAARNAKLFQEMQEKLNVQGKPSRADLWRYQSV
QRQNCQCAYCGSPITFSNSEMDHIVPRAGQGSTNTRENLVAVCHRCNQSK
GNTPFAIWAKNTSIEGVSVKEAVERTRHWVTDTGMRSTDFKKFTKAVVER
FQRATMDEEIDARSMESVAWMANELRSRVAQHFASHGTTVRVYRGSLTAE
ARRASGISGKLKFFDGVGKSRLDRRHHAIDAAVIAFTSDYVAETLAVRSN
LKQSQAHRQEAPQWREFTGKDAEHRAAWRVWCQKMEKLSALLTEDLRDDR
VVVMSNVRLRLGNGSAHKETIGKLSKVKLSSQLSVSDIDKASSEALWCAL
TREPGFDPKEGLPANPERHIRVNGTHVYAGDNIGLFPVSAGSIALRGGYA
ELGSSFHHARVYKITSGKKPAFAMLRVYTIDLLPYRNQDLFSVELKPQTM
SMRQAEKKLRDALATGNAEYLGWLVVDDELVVDTSKIATDQVKAVEAELG
TIRRWRVDGFFSPSKLRLRPLQMSKEGIKKESAPELSKIIDRPGWLPAVN
KLFSDGNVTVVRRDSLGRVRLESTAHLPVTWKVQ.

[0221] In some embodiments the Cas9 protein can be Streptococcus pasteurianus Cas9 and may comprise or consist of the amino acid sequence:

(SEQ ID NO: 155)
MTNGKILGLDIGIASVGVGIIEAKTGKVVHANSRLFSAANAENNAERRGF
RGSRRLNRRKKHRVKRVRDLFEKYGIVTDFRNLNLNPYELRVKGLTEQLK
NEELFAALRTISKRRGISYLDDAEDDSTGSTDYAKSIDENRRLLKNKTPG
QIQLERLEKYGQLRGNFTVYDENGEAHRLINVFSTSDYEKEARKILETQA
DYNKKITAEFIDDYVEILTQKRKYYHGPGNEKSRTDYGRFRTDGTTLENI
FGILIGKCNFYPDEYRASKASYTAQEYNFLNDLNNLKVSTETGKLSTEQK
ESLVEFAKNTATLGPAKLLKEIAKILDCKVDEIKGYREDDKGKPDLHTFE
PYRKLKFNLESINIDDLSREVIDKLADILTLNIIREGIEDAIKRNLPNQF
TEEQISEIIKVRKSQSTAFNKGWHSFSAKLMNELIPELYATSDEQMTILT
RLEKFKVNKKSSKNTKTIDEKEVTDEIYNPVVAKSVRQTIKIINAAVKKY
GDFDKIVIEMPRDKNADDEKKFIDKRNKENKKEKDDALKRAAYLYNSSDK
LPDEVFHGNKQLETKIRLWYQQGERCLYSGKPISIQELVHNSNNFEIDHI
LPLSLSFDDSLANKVLVYAWTNQEKGQKTPYQVIDSMDAAWSFREMKDYV
LKQKGLGKKKRDYLLTTENIDKIEVKKKFIERNLVDTRYASRVVLNSLQS
ALRELGKDTKVSVVRGQFTSQLRRKWKIDKSRETYHHHAVDALIIAASSQ
LKLWEKQDNPMFVDYGKNQVVDKQTGEILSVSDDEYKELVFQPPYQGFVN
TISSKGFEDEILFSYQVDSKYNRKVSDATIYSTRKAKIGKDKKEETYVLG
KIKDIYSQNGFDTFIKKYNKDKTQFLMYQKDSLTWENVIEVILRDYPTTK
KSEDGKNDVKCNPFEEYRRENGLICKYSKKGKGTPIKSLKYYDKKLGNCI
DITPEESRNKVILQSINPWRADVYFNPETLKYELMGLKYSDLSFEKGTGN
YHISQEKYDAIKEKEGIGKKSEFKFTLYRNDLILIKDIASGEQEIYRFLS
RTMPNVNHYVELKPYDKEKFDNVQELVEALGEADKVGRCIKGLNKPNISI
YKVRTDVLGNKYFVKKKGDKPKLDFKNNKK.

[0222] In some embodiments the Cas9 protein can be Neisseria cinerea Cas9 and may comprise or consist of the amino acid sequence:

(SEQ ID NO: 156)
MAAFKPNPMNYILGLDIGIASVGWAIVEIDEEENPIRLIDLGVRVFERAE
VPKTGDSLAAARRLARSVRRLTRRRAHRLLRARRLLKREGVLQAADFDEN
GLIKSLPNTPWQLRAAALDRKLTPLEWSAVLLHLIKHRGYLSQRKNEGET
ADKELGALLKGVADNTHALQTGDFRTPAELALNKFEKESGHIRNQRGDYS
HTFNRKDLQAELNLLFEKQKEFGNPHVSDGLKEGIETLLMTQRPALSGDA
VQKMLGHCTFEPTEPKAAKNTYTAERFVWLTKLNNLRILEQGSERPLTDT
ERATLMDEPYRKSKLTYAQARKLLDLDDTAFFKGLRYGKDNAEASTLMEM
KAYHAISRALEKEGLKDKKSPLNLSPELQDEIGTAFSLFKTDEDITGRLK
DRVQPEILEALLKHISFDKFVQISLKALRRIVPLMEQGNRYDEACTEIYG
DHYGKKNIEEKIYLPPIPADEIRNPVVLRALSQARKVINGVVRRYGSPAR
IHIETAREVGKSFKDRKEIEKRQEENRKDREKSAAKFREYFPNFVGEPKS
KDILKLRLYEQQHGKCLYSGKEINLGRLNEKGYVEIDHALPFSRTWDDSF
NNKVLALGSENQNKGNQTPYEYFNGKDNSREWQEFKARVETSRFPRSKKQ
RILLQKFDEDGFKERNLNDTRYINRFLCQFVADHMLLTGKGKRRVFASNG
QITNLLRGFWGLRKVRAENDRHHALDAVVVACSTIAMQQKITRFVRYKEM
NAFDGKTIDKETGEVLHQKAHFPQPWEFFAQEVMIRVFGKPDGKPEFEEA
DTPEKLRTLLAEKLSSRPEAVHKYVTPLFISRAPNRKMSGQGHMETVKSA
KRLDEGISVLRVPLTQLKLKDLEKMVNREREPKLYEALKARLEAHKDDPA
KAFAEPFYKYDKAGNRTQQVKAVRVEQVQKTGVWVHNHNGIADNATIVRV
DVFEKGGKYYLVPIYSWQVAKGILPDRAVVQGKDEEDWTVMDDSFEFKFV
LYANDLIKLTAKKNEFLGYFVSLNRATGAIDIRTHDTDSTKGKNGIFQSV
GVKTALSFQKYQIDELGKEIRPCRLKKRPPVR.

[0223] In some embodiments the Cas9 protein can be Campylobacter lari Cas9 and may comprise or consist of the amino acid sequence:

(SEQ ID NO: 157)
MRILGFDIGINSIGWAFVENDELKDCGVRIFTKAENPKNKESLALPRRNA
RSSRRRLKRRKARLIAIKRILAKELKLNYKDYVAADGELPKAYEGSLASV
YELRYKALTQNLETKDLARVILHIAKHRGYMNKNEKKSNDAKKGKILSAL
KNNALKLENYQSVGEYFYKEFFQKYKKNTKNFIKIRNTKDNYNNCVLSSD
LEKELKLILEKQKEFGYNYSEDFINEILKVAFFQRPLKDFSHLVGACTFF
EEEKRACKNSYSAWEFVALTKIINEIKSLEKISGEIVPTQTINEVLNLIL
DKGSITYKKFRSCINLHESISFKSLKYDKENAENAKLIDFRKLVEFKKAL
GVHSLSRQELDQISTHITLIKDNVKLKTVLEKYNLSNEQINNLLEIEFND
YINLSFKALGMILPLMREGKRYDEACEIANLKPKTVDEKKDFLPAFCDSI
FAHELSNPVVNRAISEYRKVLNALLKKYGKVHKIHLELARDVGLSKKARE
KIEKEQKENQAVNAWALKECENIGLKASAKNILKLKLWKEQKEICIYSGN
KISIEHLKDEKALEVDHIYPYSRSFDDSFINKVLVFTKENQEKLNKTPFE
AFGKNIEKWSKIQTLAQNLPYKKKNKILDENFKDKQQEDFISRNLNDTRY
IATLIAKYTKEYLNFLLLSENENANLKSGEKGSKIHVQTISGMLTSVLRH
TWGFDKKDRNNHLHHALDAIIVAYSTNSIIKAFSDFRKNQELLKARFYAK
ELTSDNYKHQVKFFEPFKSFREKILSKIDEIFVSKPPRKRARRALHKDTF
HSENKIIDKCSYNSKEGLQIALSCGRVRKIGTKYVENDTIVRVDIFKKQN
KFYAIPIYAMDFALGILPNKIVITGKDKNNNPKQWQTIDESYEFCFSLYK
NDLILLQKKNMQEPEFAYYNDFSISTSSICVEKHDNKFENLTSNQKLLFS
NAKEGSVKVESLGIQNLKVFEKYIITPLGDKIKADFQPRENISLKTSKKY
GLR.

[0224] In some embodiments the Cas9 protein can be T. denticola Cas9 and may comprise or consist of the amino acid sequence:

(SEQ ID NO: 158)
MKKEIKDYFLGLDVGTGSVGWAVTDTDYKLLKANRKDLWGMRCFETAETA
EVRRLHRGARRRIERRKKRIKLLQELFSQEIAKTDEGFFQRMKESPFYAE
DKTILQENTLFNDKDFADKTYHKAYPTINHLIKAWIENKVKPDPRLLYLA
CHNIIKKRGHFLFEGDFDSENQFDTSIQALFEYLREDMEVDIDADSQKVK
EILKDSSLKNSEKQSRLNKILGLKPSDKQKKAITNLISGNKINFADLYDN
PDLKDAEKNSISFSKDDFDALSDDLASILGDSFELLLKAKAVYNCSVLSK
VIGDEQYLSFAKVKIYEKHKTDLTKLKNVIKKHFPKDYKKVFGYNKNEKN
NNNYSGYVGVCKTKSKKLIINNSVNQEDFYKFLKTILSAKSEIKEVNDIL
TEIETGTFLPKQISKSNAEIPYQLRKMELEKILSNAEKHFSFLKQKDEKG
LSHSEKIIMLLTFKIPYYIGPINDNHKKFFPDRCWVVKKEKSPSGKTTPW
NFFDHIDKEKTAEAFITSRTNFCTYLVGESVLPKSSLLYSEYTVLNEINN
LQIIIDGKNICDIKLKQKIYEDLFKKYKKITQKQISTFIKHEGICNKTDE
VIILGIDKECTSSLKSYIELKNIFGKQVDEISTKNMLEEIIRWATIYDEG
EGKTILKTKIKAEYGKYCSDEQIKKILNLKFSGWGRLSRKFLETVTSEMP
GFSEPVNIITAMRETQNNLMELLSSEFTFTENIKKINSGFEDAEKQFSYD
GLVKPLFLSPSVKKMLWQTLKLVKEISHITQAPPKKIFIEMAKGAELEPA
RTKTRLKILQDLYNNCKNDADAFSSEIKDLSGKIENEDNLRLRSDKLYLY
YTQLGKCMYCGKPIEIGHVFDTSNYDIDHIYPQSKIKDDSISNRVLVCSS
CNKNKEDKYPLKSEIQSKQRGFWNFLQRNNFISLEKLNRLTRATPISDDE
TAKFIARQLVETRQATKVAAKVLEKMFPETKIVYSKAETVSMFRNKFDIV
KCREINDFHHAHDAYLNIVVGNVYNTKFTNNPWNFIKEKRDNPKIADTYN
YYKVFDYDVKRNNITAWEKGKTIITVKDMLKRNTPIYTRQAACKKGELFN
QTIMKKGLGQHPLKKEGPFSNISKYGGYNKVSAAYYTLIEYEEKGNKIRS
LETIPLYLVKDIQKDQDVLKSYLTDLLGKKEFKILVPKIKINSLLKINGF
PCHITGKTNDSFLLRPAVQFCCSNNEVLYFKKIIRFSEIRSQREKIGKTI
SPYEDLSFRSYIKENLWKKTKNDEIGEKEFYDLLQKKNLEIYDMLLTKHK
DTIYKKRPNSATIDILVKGKEKFKSLIIENQFEVILEILKLFSATRNVSD
LQHIGGSKYSGVAKIGNKISSLDNCILIYQSITGIFEKRIDLLKV.

[0225] In some embodiments the Cas9 protein can be S. mutans Cas9 and may comprise or consist of the amino acid sequence:

(SEQ ID NO: 159)
MKKPYSIGLDIGTNSVGWAVVTDDYKVPAKKMKVLGNTDKSHIEKNLLGA
LLFDSGNTAEDRRLKRTARRRYTRRRNRILYLQEIFSEEMGKVDDSFFHR
LEDSFLVIEDKRGERHPIFGNLEEEVKYHENFPTIYHLRQYLADNPEKVD
LRLVYLALAHIIKFRGHFLIEGKFDTRNNDVQRLFQEFLAVYDNTFENSS
LQEQNVQVEEILTDKISKSAKKDRVLKLFPNEKSNGRFAEFLKLIVGNQA
DFKKHFELEEKAPLQFSKDTYEEELEVLLAQIGDNYAELFLSAKKLYDSI
LLSGILTVTDVGTKAPLSASMIQRYNEHQMDLAQLKQFIRQKLSDKYNEV
FSDVSKDGYAGYIDGKTNQEAFYKYLKGLLNKIEGSGYFLDKIEREDFLR
KQRTFDNGSIPHQIHLQEMRAIIRRQAEFYPFLADNQDRIEKLLTFRIPY
YVGPLARGKSDFAWLSRKSADKITPWNFDEIVDKESSAEAFINRMTNYDL
YLPNQKVLPKHSLLYEKFTVYNELTKVKYKTEQGKTAFFDANMKQEIFDG
VFKVYRKVTKDKLMDFLEKEFDEFRIVDLTGLDKENKVFNASYGTYHDLC
KILDKDFLDNSKNEKILEDIVLTLTLFEDREMIRKRLENYSDLLTKEQVK
KLERRHYTGWGRLSAELIHGIRNKESRKTILDYLIDDGNSNRNFMQLIND
DALSFKEEIAKAQVIGETDNLNQVVSDIAGSPAIKKGILQSLKIVDELVK
IMGHQPENIVVEMARENQFTNQGRRNSQQRLKGLTDSIKEFGSQILKEHP
VENSQLQNDRLFLYYLQNGRDMYTGEELDIDYLSQYDIDHIIPQAFIKDN
SIDNRVLTSSKENRGKSDDVPSKDVVRKMKSYWSKLLSAKLITQRKFDNL
TKAERGGLTDDDKAGFIKRQLVETRQITKHVARILDERFNTETDENNKKI
RQVKIVTLKSNLVSNFRKEFELYKVREINDYHHAHDAYLNAVIGKALLGV
YPQLEPEFVYGDYPHFHGHKENKATAKKFFYSNIMNFFKKDDVRTDKNGE
IIWKKDEHISNIKKVLSYPQVNIVKKVEEQTGGFSKESILPKGNSDKLIP
RKTKKFYWDTKKYGGFDSPIVAYSILVIADIEKGKSKKLKTVKALVGVTI
MEKMTFERDPVAFLERKGYRNVQEENIIKLPKYSLFKLENGRKRLLASAR
ELQKGNEIVLPNHLGTLLYHAKNIHKVDEPKHLDYVDKHKDEFKELLDVV
SNFSKKYTLAEGNLEKIKELYAQNNGEDLKELASSFINLLTFTAIGAPAT
FKFFDKNIDRKRYTSTTEILNATLIHQSITGLYETRIDLNKLGGD

[0226] In some embodiments the Cas9 protein can be S. thermophilus CRISPR 3 Cas9 and may comprise or consist of the amino acid sequence:

(SEQ ID NO: 160)
MTKPYSIGLDIGTNSVGWAVTTDNYKVPSKKMKVLGNTSKKYIKKNLLGV
LLFDSGITAEGRRLKRTARRRYTRRRNRILYLQEIFSTEMATLDDAFFQR
LDDSFLVPDDKRDSKYPIFGNLVEEKAYHDEFPTIYHLRKYLADSTKKAD
LRLVYLALAHMIKYRGHFLIEGEFNSKNNDIQKNFQDFLDTYNAIFESDL
SLENSKQLEEIVKDKISKLEKKDRILKLFPGEKNSGIFSEFLKLIVGNQA
DFRKCFNLDEKASLHFSKESYDEDLETLLGYIGDDYSDVFLKAKKLYDAI
LLSGFLTVTDNETEAPLSSAMIKRYNEHKEDLALLKEYIRNISLKTYNEV
FKDDTKNGYAGYIDGKTNQEDFYVYLKKLLAEFEGADYFLEKIDREDFLR
KQRTFDNGSIPYQIHLQEMRAILDKQAKFYPFLAKNKERIEKILTFRIPY
YVGPLARGNSDFAWSIRKRNEKITPWNFEDVIDKESSAEAFINRMTSFDL
YLPEEKVLPKHSLLYETFNVYNELTKVRFIAESMRDYQFLDSKQKKDIVR
LYFKDKRKVTDKDIIEYLHAIYGYDGIELKGIEKQFNSSLSTYHDLLNII
NDKEFLDDSSNEAIIEEIIHTLTIFEDREMIKQRLSKFENIFDKSVLKKL
SRRHYTGWGKLSAKLINGIRDEKSGNTILDYLIDDGISNRNFMQLIHDDA
LSFKKKIQKAQIIGDEDKGNIKEVVKSLPGSPAIKKGILQSIKIVDELVK
VMGGRKPESIVVEMARENQYTNQGKSNSQQRLKRLEKSLKELGSKILKEN
IPAKLSKIDNNALQNDRLYLYYLQNGKDMYTGDDLDIDRLSNYDIDHIIP
QAFLKDNSIDNKVLVSSASNRGKSDDVPSLEVVKKRKTFWYQLLKSKLIS
QRKFDNLTKAERGGLSPEDKAGFIQRQLVETRQITKHVARLLDEKFNNKK
DENNRAVRTVKIITLKSTLVSQFRKDFELYKVREINDFHHAHDAYLNAVV
ASALLKKYPKLEPEFVYGDYPKYNSFRERKSATEKVYFYSNIMNIFKKSI
SLADGRVIERPLIEVNEETGESVWNKESDLATVRRVLSYPQVNVVKKVEE
QNHGLDRGKPKGLFNANLSSKPKPNSNENLVGAKEYLDPKKYGGYAGISN
SFTVLVKGTIEKGAKKKITNVLEFQGISILDRINYRKDKLNFLLEKGYKD
IELIIELPKYSLFELSDGSRRMLASILSTNNKRGEIHKGNQIFLSQKFVK
LLYHAKRISNTINENHRKYVENHKKEFEELFYYILEFNENYVGAKKNGKL
LNSAFQSWQNHSIDELCSSFIGPTGSERKGLFELTSRGSAADFEFLGVKI
PRYRDYTPSSLLKDATLIHQSVTGLYETRIDLAKLGEG

[0227] In some embodiments the Cas9 protein can be C. jejuni Cas9 and may comprise or consist of the amino acid sequence:

(SEQ ID NO: 161)
MARILAFDIGISSIGWAFSENDELKDCGVRIFTKVENPKTGESLALPRRL
ARSARKRLARRKARLNHLKHLIANEFKLNYEDYQSFDESLAKAYKGSLIS
PYELRFRALNELLSKQDFARVILHIAKRRGYDDIKNSDDKEKGAILKAIK
QNEEKLANYQSVGEYLYKEYFQKFKENSKEFTNVRNKKESYERCIAQSFL
KDELKLIFKKQREFGFSFSKKFEEEVLSVAFYKRALKDFSHLVGNCSFFT
DEKRAPKNSPLAFWVALTRIINLLNNLKNTEGILYTKDDLNALLNEVLKN
GTLTYKQTKKLLGLSDDYEFKGEKGTYFIEFKKYKEFIKALGEHNLSQDD
LNEIAKDITLIKDEIKLKKALAKYDLNQNQIDSLSKLEFKDHLNISFKAL
KLVTPLMLEGKKYDEACNELNLKVAINEDKKDFLPAFNETYYKDEVTNPV
VLRAIKEYRKVLNALLKKYGKVHKINIELAREVGKNHSQRAKIEKEQNEN
YKAKKDAELECEKLGLKINSKNILKLRLFKEQKEFCAYSGEKIKISDLQD
EKMLEIDHIYPYSRSFDDSYMNKVLVFTKQNQEKLNQTPFEAFGNDSAKW
QKIEVLAKNLPTKKQKRILDKNYKDKEQKNFKDRNLNDTRYIARLVLNYT
KDYLDFLPLSDDENTKLNDTQKGSKVHVEAKSGMLTSALRHTWGFSAKDR
NNHLHHAIDAVIIAYANNSIVKAFSDFKKEQESNSAELYAKKISELDYKN
KRKFFEPFSGFRQKVLDKIDEIFVSKPERKKPSGALHEETFRKEEEFYQS
YGGKEGVLKALELGKIRKVNGKIVKNGDMFRVDIFKHKKTNKFYAVPIYT
MDFALKVLPNKAVARSKKGEIKDWILMDENYEFCFSLYKDSLILIQTKDM
QEPEFVYYNAFTSSTVSLIVSKHDNKFETLSKNQKILFKNANEKEVIAKS
IGIQNLKVFEKYIVSALGEVTKAEFRQREDFKK

[0228] In some embodiments the Cas9 protein can be P. multocida Cas9 and may comprise or consist of the amino acid sequence:

(SEQ ID NO: 162)
MQTTNLSYILGLDLGIASVGWAVVEINENEDPIGLIDVGVRIFERAEVPK
TGESLALSRRLARSTRRLIRRRAHRLLLAKRFLKREGILSTIDLEKGLPN
QAWELRVAGLERRLSAIEWGAVLLHLIKHRGYLSKRKNESQTNNKELGAL
LSGVAQNHQLLQSDDYRTPAELALKKFAKEEGHIRNQRGAYTHTFNRLDL
LAELNLLFAQQHQFGNPHCKEHIQQYMTELLMWQKPALSGEAILKMLGKC
THEKNEFKAAKHTYSAERFVWLTKLNNLRILEDGAERALNEEERQLLINH
PYEKSKLTYAQVRKLLGLSEQAIFKHLRYSKENAESATFMELKAWHAIRK
ALENQGLKDTWQDLAKKPDLLDEIGTAFSLYKTDEDIQQYLTNKVPNSVI
NALLVSLNFDKFIELSLKSLRKILPLMEQGKRYDQACREIYGHHYGEANQ
KTSQLLPAIPAQEIRNPVVLRTLSQARKVINAIIRQYGSPARVHIETGRE
LGKSFKERREIQKQQEDNRTKRESAVQKFKELFSDFSSEPKSKDILKFRL
YEQQHGKCLYSGKEINIHRLNEKGYVEIDHALPFSRTWDDSFNNKVLVLA
SENQNKGNQTPYEWLQGKINSERWKNFVALVLGSQCSAAKKQRLLTQVID
DNKFIDRNLNDTRYIARFLSNYIQENLLLVGKNKKNVFTPNGQITALLRS
RWGLIKARENNNRHHALDAIVVACATPSMQQKITRFIRFKEVHPYKIENR
YEMVDQESGEIISPHFPEPWAYFRQEVNIRVFDNHPDTVLKEMLPDRPQA
NHQFVQPLFVSRAPTRKMSGQGHMETIKSAKRLAEGISVLRIPLTQLKPN
LLENMVNKEREPALYAGLKARLAEFNQDPAKAFATPFYKQGGQQVKAIRV
EQVQKSGVLVRENNGVADNASIVRTDVFIKNNKFFLVPIYTWQVAKGILP
NKAIVAHKNEDEWEEMDEGAKFKFSLFPNDLVELKTKKEYFFGYYIGLDR
ATGNISLKEHDGEISKGKDGVYRVGVKLALSFEKYQVDELGKNRQICRPQ
QRQPVR

[0229] In some embodiments the Cas9 protein can be F. novicida Cas9 and may comprise or consist of the amino acid sequence:

(SEQ ID NO: 163)
MNFKILPIAIDLGVKNTGVFSAFYQKGTSLERLDNKNGKVYELSKDSYTL
LMNNRTARRHQRRGIDRKQLVKRLFKLIWTEQLNLEWDKDTQQAISFLFN
RRGFSFITDGYSPEYLNIVPEQVKAILMDIFDDYNGEDDLDSYLKLATEQ
ESKISEIYNKLMQKILEFKLMKLCTDIKDDKVSTKTLKEITSYEFELLAD
YLANYSESLKTQKFSYTDKQGNLKELSYYHHDKYNIQEFLKRHATINDRI
LDTLLTDDLDIWNFNFEKFDFDKNEEKLQNQEDKDHIQAHLHHFVFAVNK
IKSEMASGGRHRSQYFQEITNVLDENNHQEGYLKNFCENLHNKKYSNLSV
KNLVNLIGNLSNLELKPLRKYFNDKIHAKADHWDEQKFIETYCHWILGEW
RVGVKDQDKKDGAKYSYKDLCNELKQKVTKAGLVDFLLELDPCRTIPPYL
DNNNRKPPKCQSLILNPKFLDNQYPNWQQYLQELKKLQSIQNYLDSFETD
LKVLKSSKDQPYFVEYKSSNQQIASGQRDYKDLDARILQFIFDRVKASDE
LLLNEIYFQAKKLKQKASSELEKLESSKKLDEVIANSQLSQILKSQHTNG
IFEQGTFLHLVCKYYKQRQRARDSRLYIMPEYRYDKKLHKYNNTGRFDDD
NQLLTYCNHKPRQKRYQLLNDLAGVLQVSPNFLKDKIGSDDDLFISKWLV
EHIRGFKKACEDSLKIQKDNRGLLNHKINIARNTKGKCEKEIFNLICKIE
GSEDKKGNYKHGLAYELGVLLFGEPNEASKPEFDRKIKKFNSIYSFAQIQ
QIAFAERKGNANTCAVCSADNAHRMQQIKIIEPVEDNKDKIILSAKAQRL
PAIPTRIVDGAVKKMATILAKNIVDDNWQNIKQVLSAKHQLHIPIIIESN
AFEFEPALADVKGKSLKDRRKKALERISPENIFKDKNNRIKEFAKGISAY
SGANLTDGDFDGAKEELDHIIPRSHKKYGTLNDEANLICVTRGDNKNKGN
RIFCLRDLADNYKLKQFETTDDLEIEKKIADTIWDANKKDFKFGNYRSFI
NLTPQEQKAFRHALFLADENPIKQAVIRAINNRNRTFVNGTQRYFAEVLA
NNIYLRAKKENLNTDKISFDYFGIPTIGNGRGIAEIRQLYEKVDSDIQAY
AKGDKPQASYSHLIDAMLAFCIAADEHRNDGSIGLEIDKNYSLYPLDKNT
GEVFTKDIFSQIKITDNEFSDKKLVRKKAIEGFNTHRQMTRDGIYAENYL
PILIHKELNEVRKGYTWKNSEEIKIFKGKKYDIQQLNNLVYCLKFVDKPI
SIDIQISTLEELRNILTTNNIAATAEYYYINLKTQKLHEYYIENYNTALG
YKKYSKEMEFLRSLAYRSERVKIKSIDDVKQVLDKDSNFIIGKITLPFKK
EWQRLYREWQNTTIKDDYEFLKSFFNVKSITKLHKKVRKDFSLPISTNEG
KFLVKRKTWDNNFIYQILNDSDSRADGTKPFIPAFDISKNEIVEAIIDSF
TSKNIFWLPKNIELQKVDNKNIFAIDTSKWFEVETPSDLRDIGIATIQYK
IDNNSRPKVRVKLDYVIDDDSKINYFMNHSLLKSRYPDKVLEILKQSTII
EFESSGFNKTIKEMLGMKLAGIYNETSNN

[0230] In some embodiments the Cas9 protein can be Lactobacillus buchneri Cas9 and may comprise or consist of the amino acid sequence:

(SEQ ID NO: 164)
MKVNNYHIGLDIGTSSIGWVAIGKDGKPLRVKGKTAIGARLFQEGNPAAD
RRMFRTTRRRLSRRKWRLKLLEEIFDPYITPVDSTFFARLKQSNLSPKDS
RKEFKGSMLFPDLTDMQYHKNYPTIYHLRHALMTQDKKFDIRMVYLAIHH
IVKYRGNFLNSTPVDSFKASKVDFVDQFKKLNELYAAINPEESFKINLAN
SEDIGHQFLDPSIRKFDKKKQIPKIVPVMMNDKVTDRLNGKIASEIIHAI
LGYKAKLDVVLQCTPVDSKPWALKFDDEDIDAKLEKILPEMDENQQSIVA
ILQNLYSQVTLNQIVPNGMSLSESMIEKYNDHHDHLKLYKKLIDQLADPK
KKAVLKKAYSQYVGDDGKVIEQAEFWSSVKKNLDDSELSKQIMDLIDAEK
FMPKQRTSQNGVIPHQLHQRELDEIIEHQSKYYPWLVEINPNKHDLHLAK
YKIEQLVAFRVPYYVGPMITPKDQAESAETVFSWMERKGTETGQITPWNF
DEKVDRKASANRFIKRMTTKDTYLIGEDVLPDESLLYEKFKVLNELNMVR
VNGKLLKVADKQAIFQDLFENYKHVSVKKLQNYIKAKTGLPSDPEISGLS
DPEHFNNSLGTYNDFKKLFGSKVDEPDLQDDFEKIVEWSTVFEDKKILRE
KLNEITWLSDQQKDVLESSRYQGWGRLSKKLLTGIVNDQGERIIDKLWNT
NKNFMQIQSDDDFAKRIHEANADQMQAVDVEDVLADAYTSPQNKKAIRQV
VKVVDDIQKAMGGVAPKYISIEFTRSEDRNPRRTISRQRQLENTLKDTAK
SLAKSINPELLSELDNAAKSKKGLTDRLYLYFTQLGKDIYTGEPINIDEL
NKYDIDHILPQAFIKDNSLDNRVLVLTAVNNGKSDNVPLRMFGAKMGHFW
KQLAEAGLISKRKLKNLQTDPDTISKYAMHGFIRRQLVETSQVIKLVANI
LGDKYRNDDTKIIEITARMNHQMRDEFGFIKNREINDYHHAFDAYLTAFL
GRYLYHRYIKLRPYFVYGDFKKFREDKVTMRNFNFLHDLTDDTQEKIADA
ETGEVIWDRENSIQQLKDVYHYKFMLISHEVYTLRGAMFNQTVYPASDAG
KRKLIPVKADRPVNVYGGYSGSADAYMAIVRIHNKKGDKYRVVGVPMRAL
DRLDAAKNVSDADFDRALKDVLAPQLTKTKKSRKTGEITQVIEDFEIVLG
KVMYRQLMIDGDKKFMLGSSTYQYNAKQLVLSDQSVKTLASKGRLDPLQE
SMDYNNVYlEILDKVNQYFSLYDMNKFRHKLNLGFSKFISFPNHNVLDGN
TKVSSGKREILQEILNGLHANPTFGNLKDVGITTPFGQLQQPNGILLSDE
TKIRYQSPTGLFERTVSLKDL

[0231] In some embodiments the Cas9 protein can be Listeria innocua Cas9 and may comprise or consist of the amino acid sequence:

(SEQ ID NO: 165)
MKKPYTIGLDIGTNSVGWAVLTDQYDLVKRKMKIAGDSEKKQIKKNFWGV
RLFDEGQTAADRRMARTARRRIERRRNRISYLQGIFAEEMSKTDANFFCR
LSDSFYVDNEKRNSRHPFFATIEEEVEYHKNYPTIYHLREELVNSSEKAD
LRLVYLALAHIIKYRGNFLIEGALDTQNTSVDGIYKQFIQTYNQVFASGI
EDGSLKKLEDNKDVAKILVEKVTRKEKLERILKLYPGEKSAGMFAQFISL
IVGSKGNFQKPFDLIEKSDIECAKDSYEEDLESLLALIGDEYAELFVAAK
NAYSAVVLSSIITVAETETNAKLSASMIERFDTHEEDLGELKAFIKLHLP
KHYEEIFSNTEKHGYAGYIDGKTKQADFYKYMKMTLENIEGADYFIAKIE
KENFLRKQRTFDNGAIPHQLHLEELEAILHQQAKYYPFLKENYDKIKSLV
TFRIPYFVGPLANGQSEFAWLTRKADGEIRPWNIEEKVDFGKSAVDFIEK
MTNKDTYLPKENVLPKHSLCYQKYLVYNELTKVRYINDQGKTSYFSGQEK
EQIFNDLFKQKRKVKKKDLELFLRNMSHVESPTIEGLEDSFNSSYSTYHD
LLKVGIKQEILDNPVNTEMLENIVKILTVFEDKRMIKEQLQQFSDVLDGV
VLKKLERRHYTGWGRLSAKLLMGIRDKQSHLTILDYLMNDDGLNRNLMQL
INDSNLSFKSIIEKEQVTTADKDIQSIVADLAGSPAIKKGILQSLKIVDE
LVSVMGYPPQTIVVEMARENQTTGKGKNNSRPRYKSLEKAIKEFGSQILK
EHPTDNQELRNNRLYLYYLQNGKDMYTGQDLDIHNLSNYDIDHIVPQSFI
TDNSIDNLVLTSSAGNREKGDDVPPLEIVRKRKVFWEKLYQGNLMSKRKF
DYLTKAERGGLTEADKARFIHRQLVETRQITKNVANILHQRFNYEKDDHG
NTMKQVRIVTLKSALVSQFRKQFQLYKVRDVNDYHHAHDAYLNGVVANTL
LKVYPQLEPEFVYGDYHQFDWFKANKATAKKQFYTNIMLFFAQKDRIIDE
NGEILWDKKYLDTVKKVMSYRQMNIVKKTEIQKGEFSKATIKPKGNSSKL
IPRKTNWDPMKYGGLDSPNMAYAVVIEYAKGKNKLVFEKKIIRVTIMERK
AFEKDEKAFLEEQGYRQPKVLAKLPKYTLYECEEGRRRMLASANEAQKGN
QQVLPNHLVTLLHHAANCEVSDGKSLDYIESNREMFAELLAHVSEFAKRY
TLAEANLNKINQLFEQNKEGDIKAIAQSFVDLMAFNAMGAPASFKFFETT
IERKRYNNLKELLNSTIIYQSITGLYESRKRLDD

[0232] In some embodiments the Cas9 protein can be L. pneumophilia Cas9 and may comprise or consist of the amino acid sequence:

(SEQ ID NO: 166)
MESSQILSPIGIDLGGKFTGVCLSHLEAFAELPNHANTKYSVILIDHNNF
QLSQAQRRATRHRVRNKKRNQFVKRVALQLFQHILSRDLNAKEETALCHY
LNNRGYTYVDTDLDEYIKDETTINLLKELLPSESEHNFIDWFLQKMQSSE
FRKILVSKVEEKKDDKELKNAVKNIKNFITGFEKNSVEGHRHRKVYFENI
KSDITKDNQLDSIKKKIPSVCLSNLLGHLSNLQWKNLHRYLAKNPKQFDE
QTFGNEFLRMLKNFRHLKGSQESLAVRNLIQQLEQSQDYISILEKTPPEI
TIPPYEARTNTGMEKDQSLLLNPEKLNNLYPNWRNLIPGIIDAHPFLEKD
LEHTKLRDRKRIISPSKQDEKRDSYILQRYLDLNKKIDKFKIKKQLSFLG
QGKQLPANLIETQKEMETHFNSSLVSVLIQIASAYNKEREDAAQGIWFDN
AFSLCELSNINPPRKQKILPLLVGAILSEDFINNKDKWAKFKIFWNTHKI
GRTSLKSKCKEIEEARKNSGNAFKIDYEEALNHPEHSNNKALIKIIQTIP
DIIQAIQSHLGHNDSQALIYHNPFSLSQLYTILETKRDGFHKNCVAVTCE
NYWRSQKTEIDPEISYASRLPADSVRPFDGVLARMMQRLAYEIAMAKWEQ
IKHIPDNSSLLIPIYLEQNRFEFEESFKKIKGSSSDKTLEQAIEKQNIQW
EEKFQRIINASMNICPYKGASIGGQGEIDHIYPRSLSKKHFGVIFNSEVN
LIYCSSQGNREKKEEHYLLEHLSPLYLKHQFGTDNVSDIKNFISQNVANI
KKYISFHLLTPEQQKAARHALFLDYDDEAFKTITKFLMSQQKARVNGTQK
FLGKQIMEFLSTLADSKQLQLEFSIKQITAEEVHDHRELLSKQEPKLVKS
RQQSFPSHAIDATLTMSIGLKEFPQFSQELDNSWFINHLMPDEVHLNPVR
SKEKYNKPNISSTPLFKDSLYAERFIPVWVKGETFAIGFSEKDLFEIKPS
NKEKLFTLLKTYSTKNPGESLQELQAKSKAKWLYFPINKTLALEFLHHYF
HKEIVTPDDTTVCHFINSLRYYTKKESITVKILKEPMPVLSVKFESSKKN
VLGSFKHTIALPATKDWERLFNHPNFLALKANPAPNPKEFNEFIRKYFLS
DNNPNSDIPNNGHNIKPQKHKAVRKVFSLPVIPGNAGTMMRIRRKDNKGQ
PLYQLQTIDDTPSMGIQINEDRLVKQEVLMDAYKTRNLSTIDGINNSEGQ
AYATFDNWLTLPVSTFKPEIIKLEMKPHSKTRRYIRITQSLADFIKTIDE
ALMIKPSDSIDDPLNMPNEIVCKNKLFGNELKPRDGKMKIVSTGKIVTYE
FESDSTPQWIQTLYVTQLKKQP

[0233] In some embodiments the Cas9 protein can be N. lactamica Cas9 and may comprise or consist of the amino acid sequence:

(SEQ ID NO: 167)
MAAFKPNPMNYILGLDIGIASVGWAMVEVDEEENPIRLIDLGVRVFERAE
VPKTGDSLAMARRLARSVRRLTRRRAHRLLRARRLLKREGVLQDADFDEN
GLVKSLPNTPWQLRAAALDRKLTCLEWSAVLLHLVKHRGYLSQRKNEGET
ADKELGALLKGVADNAHALQTGDFRTPAELALNKFEKESGHIRNQRGDYS
HTFSRKDLQAELNLLFEKQKEFGNPHVSDGLKEDIETLLMAQRPALSGDA
VQKMLGHCTFEPAEPKAAKNTYTAERFIWLTKLNNLRILEQGSERPLTDT
ERATLMDEPYRKSKLTYAQARKLLGLEDTAFFKGLRYGKDNAEASTLMEM
KAYHAISRALEKEGLKDKKSPLNLSTELQDEIGTAFSLFKTDKDITGRLK
DRVQPEILEALLKHISFDKFVQISLKALRRIVPLMEQGKRYDEACAEIYG
DHYCKKNAEEKIYLPPIPADEIRNPVVLRALSQARKVINCVVRRYGSPAR
IHIETAREVGKSFKDRKEIEKRQEENRKDREKAAAKFREYFPNFVGEPKS
KDILKLRLYEQQHGKCLYSGKEINLVRLNEKGYVEIDHALPFSRTWDDSF
NNKVLVLGSENQNKGNQTPYEYFNGKDNSREWQEFKARVETSRFPRSKKQ
RILLQKFDEEGFKERNLNDTRYVNRFLCQFVADHILLTGKGKRRVFASNG
QITNLLRGFWGLRKVRIENDRHHALDAVVVACSTVAMQQKITRFVRYKEM
NAFDGKTIDKETGEVLHQKAHFPQPWEFFAQEVMIRVFGKPDGKPEFEEA
DTPEKLRTLLAEKLSSRPEAVHEYVTPLFVSRAPNRKMSGQGHMETVKSA
KRLDEGISVLRVPLTQLKLKGLEKMVNREREPKLYDALKAQLETHKDDPA
KAFAEPFYKYDKAGSRTQQVKAVRIEQVQKTGVWVRNHNGIADNATMVRV
DVFEKGGKYYLVPIYSWQVAKGILPDRAVVAFKDEEDWTVMDDSFEFRFV
LYANDLIKLTAKKNEFLGYFVSLNRATGAIDIRTHDTDSTKGKNGIFQSV
GVKTALSFQKNQIDELGKEIRPCRLKKRPPVR

[0234] In some embodiments the Cas9 protein can be N. meningitides Cas9 and may comprise or consist of the amino acid sequence:

(SEQ ID NO: 168)
MAAFKPNPINYILGLDIGIASVGWAMVEIDEDENPICLIDLGVRVFERAE
VPKTGDSLAMARRLARSVRRLTRRRAHRLLRARRLLKREGVLQAADFDEN
GLIKSLPNTPWQLRAAALDRKLTPLEWSAVLLHLIKHRGYLSQRKNEGET
ADKELGALLKGVADNAHALQTGDFRTPAELALNKFEKESGHIRNQRGDYS
HTFSRKDLQAELILLFEKQKEFGNPHVSGGLKEGIETLLMTQRPALSGDA
VQKMLGHCTFEPAEPKAAKNTYTAERFIWLTKLNNLRILEQGSERPLTDT
ERATLMDEPYRKSKLTYAQARKLLGLEDTAFFKGLRYGKDNAEASTLMEM
KAYHAISRALEKEGLKDKKSPLNLSPELQDEIGTAFSLFKTDEDITGRLK
DRIQPEILEALLKHISFDKFVQISLKALRRIVPLMEQGKRYDEACAEIYG
DHYGKKNTEEKIYLPPIPADEIRNPVVLRALSQARKVINGVVRRYGSPAR
IHIETAREVGKSFKDRKEIEKRQEENRKDREKAAAKFREYFPNFVGEPKS
KDILKLRLYEQQHGKCLYSGKEINLGRLNEKGYVEIDHALPFSRTWDDSF
NNKVLVLGSENQNKGNQTPYEYFNGKDNSREWQEFKARVETSRFPRSKKQ
RILLQKFDEDGFKERNLNDTRYVNRFLCQFVADRMRLTGKGKKRVFASNG
QITNLLRGFWGLRKVRAENDRHHALDAVVVACSTVAMQQKITRFVRYKEM
NAFDGKTIDKETGEVLHQKTHFPQPWEFFAQEVMIRVFGKPDGKPEFEEA
DTPEKLRTLLAEKLSSRPEAVHEYVTPLFVSRAPNRKMSGQGHMETVKSA
KRLDEGVSVLRVPLTQLKLKDLEKMVNREREPKLYEALKARLEAHKDDPA
KAFAEPFYKYDKAGNRTQQVKAVRVEQVQKTGVWVRNHNGIADNATMVRV
DVFEKGDKYYLVPIYSWQVAKGILPDRAVVQGKDEEDWQLIDDSFNFKFS
LHPNDLVEVITKKARMFGYFASCHRGTGNINIRIHDLDHKIGKNGILEGI
GVKTALSFQKYQIDELGKEIRPCRLKKRPPVR

[0235] In some embodiments the Cas9 protein can be B. longum Cas9 and may comprise or consist of the amino acid sequence:

(SEQ ID NO: 169)
MLSRQLLGASHLARPVSYSYNVQDNDVHCSYGERCFMRGKRYRIGIDVGL
NSVGLAAVEVSDENSPVRLLNAQSVIHDGGVDPQKNKEAITRKNMSGVAR
RTRRMRRRKRERLHKLDMLLGKFGYPVIEPESLDKPFEEWHVRAELATRY
IEDDELRRESISIALRHMARHRGWRNPYRQVDSLISDNPYSKQYGELKEK
AKAYNDDATAAEEESTPAQLVVAMLDAGYAEAPRLRWRTGSKKPDAEGYL
PVRLMQEDNANELKQIFRVQRVPADEWKPLFRSVFYAVSPKGSAEQRVGQ
DPLAPEQARALKASLAFQEYRIANVITNLRIKDASAELRKLTVDEKQSIY
DQLVSPSSEDITWSDLCDFLGFKRSQLKGVGSLTEDGEERISSRPPRLTS
VQRIYESDNKIRKPLVAWWKSASDNEHEAMIRLLSNTVDIDKVREDVAYA
SAIEFIDGLDDDALTKLDSVDLPSGRAAYSVETLQKLTRQMLTTDDDLHE
ARKTLFNVTDSWRPPADPIGEPLGNPSVDRVLKNVNRYLMNCQQRWGNPV
SVNIEHVRSSFSSVAFARKDKREYEKNNEKRSIFRSSLSEQLRADEQMEK
VRESDLRRLEAIQRQNGQCLYCGRTITFRTCEMDHIVPRKGVGSTNTRTN
FAAVCAECNRMKSNTPFAIWARSEDAQTRGVSLAEAKKRVTMFTFNPKSY
APREVKAFKQAVIARLQQTEDDAAIDNRSIESVAWMADELHRRIDWYFNA
KQYVNSASIDDAEAETMKTTVSVFQGRVTASARRAAGIEGKIHFIGQQSK
TRLDRRHHAVDASVIAMMNTAAAQTLMERESLRESQRLIGLMPGERSWKE
YPYEGTSRYESFHLWLDNMDVLLELLNDALDNDRIAVMQSQRYVLGNSIA
HDATIHPLEKVPLGSAMSADLIRRASTPALWCALTRLPDYDEKEGLPEDS
HREIRVHDTRYSADDEMGFFASQAAQIAVQEGSADIGSAIHHARVYRCWK
TNAKGVRKYFYGMIRVFQTDLLRACHDDLFTVPLPPQSISMRYGEPRVVQ
ALQSGNAQYLGSLVVGDEIEMDFSSLDVDGQIGEYLQFFSQFSGGNLAWK
HWVVDGFFNQTQLRIRPRYLAAEGLAKAFSDDVVPDGVQKIVTKQGWLPP
VNTASKTAVRIVRRNAFGEPRLSSAHHMPCSWQWRHE

[0236] In some embodiments the Cas9 protein can be A. muciniphila Cas9 and may comprise or consist of the amino acid sequence:

(SEQ ID NO: 170)
MSRSLTFSFDIGYASIGWAVIASASHDDADPSVCGCGTVLFPKDDCQAFK
RREYRRLRRNIRSRRVRIERIGRLLVQAQIITPEMKETSGHPAPFYLASE
ALKGHRTLAPIELWHVLRWYAHNRGYDNNASWSNSLSEDGGNGEDTERVK
HAQDLMDKHGTATMAETICRELKLEEGKADAPMEVSTPAYKNLNTAFPRL
IVEKEVRRILELSAPLIPGLTAEIIELIAQHHPLTTEQRGVLLQHGIKLA
RRYRGSLLFGQLIPRFDNRIISRCPVTWAQVYEAELKKGNSEQSARERAE
KLSKVPTANCPEFYEYRMARILCNIRADGEPLSAEIRRELMNQARQEGKL
TKASLEKAISSRLGKETETNVSNYFTLHPDSEEALYLNPAVEVLQRSGIG
QILSPSVYRIAANRLRRGKSVTPNYLLNLLKSRGESGEALEKKIEKESKK
KEADYADTPLKPKYATGRAPYARTVLKKVVEEILDGEDPTRPARGEAHPD
GELKAHDGCLYCLLDTDSSVNQHQKERRLDTMTNNHLVRHRMLILDRLLK
DLIQDFADGQKDRISRVCVEVGKELTTFSAMDSKKIQRELTLRQKSHTDA
VNRLKRKLPGKALSANLIRKCRIAMDMNWTCPFTGATYGDHELENLELEH
IVPHSFRQSNALSSLVLTWPGVNRMKGQRTGYDFVEQEQENPVPDKPNLH
ICSLNNYRELVEKLDDKKGHEDDRRRKKKRKALLMVRGLSHKHQSQNHEA
MKEIGMTEGMMTQSSHLMKLACKSIKTSLPDAHIDMIPGAVTAEVRKAWD
VFGVFKELCPEAADPDSGKILKENLRSLTHLHHALDACVLGLIPYIIPAH
HNGLLRRVLAMRRIPEKLIPQVRPVANQRHYVLNDDGRMMLRDLSASLKE
NIREQLMEQRVIQHVPADMGGALLKETMQRVLSVDGSGEDAMVSLSKKKD
GKKEKNQVKASKLVGVFPEGPSKLKALKAAIEIDGNYGVALDPKPVVIRH
IKVFKRIMALKEQNGGKPVRILKKGMLIHLTSSKDPKHAGVWRIESIQDS
KGGVKLDLQRAHCAVPKNKTHECNWREVDLISLLKKYQMKRYPTSYTGT
PR

[0237] In some embodiments the Cas9 protein can be O. laneus Cas9 and may comprise or consist of the amino acid sequence:

(SEQ ID NO: 171)
METTLGIDLGTNSIGLALVDQEEHQILYSGVRIFPEGINKDTIGLGEKEE
SRNATRRAKRQMRRQYFRKKLRKAKLLELLIAYDMCPLKPEDVRRWKNWD
KQQKSTVRQFPDTPAFREWLKQNPYELRKQAVTEDVTRPELGRILYQMIQ
RRGFLSSRKGKEEGKIFTGKDRMVGIDETRKNLQKQTLGAYLYDIAPKNG
EKYRFRTERVRARYTLRDMYIREFEIIWQRQAGHLGLAHEQATRKKNIFL
EGSATNVRNSKLITHLQAKYGRGHVLIEDTRITVTFQLPLKEVLGGKIEI
EEEQLKFKSNESVLFWQRPLRSQKSLLSKCVFEGRNFYDPVHQKWIIAGP
TPAPLSHPEFEEFRAYQFINNIIYGKNEHLTAIQREAVFELMCTESKDFN
FEKIPKHLKLFEKFNFDDTTKVPACTTISQLRKLFPHPVWEEKREEIWHC
FYFYDDNTLLFEKLQKDYALQTNDLEKIKKIRLSESYGNVSLKAIRRINP
YLKKGYAYSTAVLLGGIRNSFGKRFEYFKEYEPEIEKAVCRILKEKNAEG
EVIRKIKDYLVHNRFGFAKNDRAFQKLYHHSQAITTQAQKERLPETGNLR
NPIVQQGLNELRRTVNKLLATCREKYGPSFKFDHIHVEMGRELRSSKTER
EKQSRQIRENEKKNEAAKVKLAEYGLKAYRDNIQKYLLYKEIEEKGGTVC
CPYTGKTLNISHTLGSDNSVQIEHIIPYSISLDDSLANKTLCDATFNREK
GELTPYDFYQKDPSPEKWGASSWEEIEDRAFRLLPYAKAQRFIRRKPQES
NEFISRQLNDTRYISKKAVEYLSAICSDVKAFPGQLTAELRHLWGLNNIL
QSAPDITFPLPVSAENHREYYVITNEQNEVIRLFPKQGETPRIEKGELLL
TGEVERKVFRCKGMQEFQTDVSDGKYWRRIKLSSSVTWSPLFAPKPISAD
GQIVLKGRIEKGVFVCNQLKQKLKTGLPDGSYWISLPVISQTFKEGESVN
NSKLTSQQVQLFGRVREGIFRCHNYQCPASGADGNFWCTLDTDTAQPAFT
PIKNAPPGVGGGQIILTGDVDDKGIFHADDDLHYELPASLPKGKYYGIFT
VESCDPTLIPIELSAPKTSKGENLIEGNIWVDEHTGEVRFDPKKNREDQR
HHAIDAIVIALSSQSLFQRLSTYNARRENKKRGLDSTEHFPSPWPGFAQD
VRQSVVPLLVSYKQNPKTLCKISKTLYKDGKKIHSCGNAVRGQLHKETVY
GQRTAPGATEKSYHIRKDIRELKTSKHIGKVVDITIRQMLLKHLQENYHI
DITQEFNIPSNAFFKEGVYRIFLPNKHGEPVPIKKIRMKEELGNAERLKD
NINQYVNPRNNHHVMIYQDADGNLKEEIVSFWSVIERQNQGQPIYQLPRE
GRNIVSILQINDTFLIGLKEEEPEVYRNDLSTLSKHLYRVQKLSGMYYTF
RHHLASTLNNEREEFRIQSLEAWKRANPVKVQIDEIGRITFLNGPLC.

[0238] In some embodiments of the compositions of the disclosure, the sequence encoding the first RNA binding protein comprises a sequence isolated or derived from a CRISPR Cas protein. In some embodiments, the CRISPR Cas protein comprises a Type V CRISPR Cas protein. In some embodiments, the Type V CRISPR Cas protein comprises a Cpf1 protein. Exemplary Cpf1 proteins of the disclosure may be isolated or derived from any species, including, but not limited to, a bacteria or an archaea. Exemplary Cpf1 proteins of the disclosure may be isolated or derived from any species, including, but not limited to, Francisella tularensis subsp. novicida, Acidaminococcus sp. BV3L6 and Lachnospiraceae bacterium sp. ND2006. Exemplary Cpf1 proteins of the disclosure may be nuclease inactivated.

[0239] Exemplary wild type Francisella tularensis subsp. Novicida Cpf1 (FnCpf1) proteins of the disclosure may comprise or consist of the amino acid sequence:

| (SEQ ID NO: 172) | |
|---|---|
| 1 | MSIYQEFVNK YSLSKTLRFE LIPQGKTLEN IKARGLILDD EKRAKDYKKA KQIIDKYHQF |
| 61 | FIEEILSSVC ISEDLLQNYS DVYFKLKKSD DDNLQKDFKS AKDTIKKQIS EYIKDSEKFK |
| 121 | NLFNQNLIDA KKGQESDLIL WLKQSKDNGI ELFKANSDIT DIDEALEIIK SFKGWTTYFK |
| 181 | GFHENRKNVY SSNDIPTSII YRIVDDNLPK FLENKAKYES LKDKAPEAIN YEQIKKDLAE |
| 241 | ELTFDIDYKT SEVNQRVFSL DEVFEIANFN NYLNQSGITK FNTIIGGKFV NGENTKRKGI |
| 301 | NEYINLYSQQ INDKTLKKYK MSVLFKQILS DTESKSFVID KLEDDSDVVT TMQSFYEQIA |
| 361 | AFKTVEEKSI KETLSLLFDD LKAQKLDLSK IYFKNDKSLT DLSQQVFDDY SVIGTAVLEY |
| 421 | ITQQIAPKNL DNPSKKEQEL IAKKTEKAKY LSLETIKLAL EEFNKHRDID KQCRFEEILA |
| 481 | NFAAIPMIFD EIAQNKDNLA QISIKYQNQG KKDLLQASAE DDVKAIKDLL DQTNNLLHKL |
| 541 | KIFHISQSED KANILDKDEH FYLVFEECYF ELANIVPLYN KIRNYITQKP YSDEKFKLNF |
| 601 | ENSTLANGWD KNKEPDNTAI LFIKDDKYYL GVMNKKNNKI FDDKAIKENK GEGYKKIVYK |
| 661 | LLPGANKMLP KVFFSAKSIK FYNPSEDILR IRNHSTHTKN GSPQKGYEKF EFNIEDCRKF |
| 721 | IDFYKQSISK HPEWKDFGFR FSDTQRYNSI DEFYREVENQ GYKLTFENIS ESYIDSVVNQ |
| 781 | GKLYLFQIYN KDFSAYSKGR PNLHTLYWKA LFDERNLQDV VYKLNGEAEL FYRKQSIPKK |
| 841 | ITHPAKEAIA NKNKDNPKKE SVFEYDLIKD KRFTEDKFFF HCPITINFKS SGANKFNDEI |
| 901 | NLLLKEKAND VHILSIDRGE RHLAYYTLVD GKGNIIKQDT FNIIGNDRMK TNYHDKLAAI |
| 961 | EKDRDSARKD WKKINNIKEM KEGYLSQVVH EIAKLVIEYN AIVVFEDLNF GFKRGRFKVE |
| 1021 | KQVYQKLEKM LIEKLNYLVF KDNEFDKTGG VLRAYQLTAP FETFKKMGKQ TGIIYYVPAG |
| 1081 | FTSKICPVTG FVNQLYPKYE SVSKSQEFFS KFDKICYNLD KGYFEFSFDY KNFGDKAAKG |
| 1141 | KWTIASFGSR LINFRNSDKN HNWDTREVYP TKELEKLLKD YSIEYGHGEC IKAAICGESD |
| 1201 | KKFFAKLTSV LNTILQMRNS KTGTELDYLI SPVADVNGNF FDSRQAPKNM PQDADANGAY |
| 1261 | HIGLKGLMLL GRIKNNQEGK KLNLVIKNEE YFEFVQNRNN. |

[0240] Exemplary wild type Lachnospiraceae bacterium sp. ND2006 Cpf1 (LbCpf1) proteins of the disclosure may comprise or consist of the amino acid sequence:

| (SEQ ID NO: 173) | |
|---|---|
| 1 | AASKLEKFTN CYSLSKTLRF KAIPVGKTQE NIDNKRLLVE DEKRAEDYKG VKKLLDRYYL |
| 61 | SFINDVLHSI KLKNLNNYIS LFRKKTRTEK ENKELENLEI NLRKEIAKAF KGAAGYKSLF |
| 121 | KKDIIETILP EAADDKDEIA LVNSFNGFTT AFTGFFDNRE NMFSEEAKST SIAFRCINEN |
| 181 | LTRYISNMDI FEKVDAIFDK HEVQEIKEKI LNSDYDVEDF FEGEFFNFVL TQEGIDVYNA |
| 241 | IIGGFVTESG EKIKGLNEYI NLYNAKTKQA LPKFKPLYKQ VLSDRESLSF YGEGYTSDEE |
| 301 | VLEVFRNTLN KNSEIFSSIK KLEKLFKNFD EYSSAGIFVK NGPAISTISK DIFGEWNLIR |
| 361 | DKWNAEYDDI HLKKKAVVTE KYEDDRRKSF KKIGSFSLEQ LQEYADADLS VVEKLKEIII |
| 421 | QKVDEIYKVY GSSEKLFDAD FVLEKSLKKN DAVVAIMKDL LDSVKSFENY IKAFFGEGKE |
| 481 | TNRDESFYGD FVLAYDILLK VDHIYDAIRN YVTQKPYSKD KFKLYFQNPQ FMGGWDKDKE |
| 541 | TDYRATILRY GSKYYLAIMD KKYAKCLQKI DKDDVNGNYE KINYKLLPGP NKMLPKVFFS |
| 601 | KKWMAYYNPS EDIQKIYKNG TFKKGDMFNL NDCHKLIDFF KDSISRYPKW SNAYDFNFSE |
| 661 | TEKYKDIAGF YREVEEQGYK VSFESASKKE VDKLVEEGKL YMFQIYNKDF SDKSHGTPNL |
| 721 | HTMYFKLLFD ENNHGQIRLS GGAELFMRRA SLKKEELVVH PANSPIANKN PDNPKKTTTL |
| 781 | SYDVYKDKRF SEDQYELHIP IAINKCPKNI FKINTEVRVL LKHDDNPYVI GIDRGERNLL |
| 841 | YIVVVDGKGN IVEQYSLNEI INNFNGIRIK TDYHSLLDKK EKERFEARQN WTSIENIKEL |
| 901 | KAGYISQVVH KICELVEKYD AVIALEDLNS GFKNSRVKVE KQVYQKFEKM LIDKLNYMVD |
| 961 | KKSNPCATGG ALKGYQITNK FESFKSMSTQ NGFIFYIPAW LTSKIDPSTG FVNLLKTKYT |
| 1021 | SIADSKKFIS SFDRIMYVPE EDLFEFALDY KNFSRTDADY IKKWKLYSYG NRIRIFAAAK |
| 1081 | KNNVFAWEEV CLTSAYKELF NKYGINYQQG DIRALLCEQS DKAFYSSFMA LMSLMLQMRN |
| 1141 | SITGRTDVDF LISPVKNSDG IFYDSRNYEA QENAILPKNA DANGAYNIAR KVLWAIGQFK |
| 1201 | KAEDEKLDKV KIAISNKEWL EYAQTSVK. |

[0241] Exemplary wild type Acidaminococcus sp. BV3L6 Cpf1 (AsCpf1) proteins of the disclosure may comprise or consist of the amino acid sequence:

| (SEQ ID NO: 174) | |
|---|---|
| 1 | MTQFEGFTNL YQVSKTLRFE LIPQGKTLKH IQEQGFIEED KARNDHYKEL KPIIDRIYKT |
| 61 | YADQCLQLVQ LDWENLSAAI DSYRKEKTEE TRNALIEEQA TYRNAIHDYF IGRTDNLTDA |
| 121 | INKRHAEIYK GLFKAELFNG KVLKQLGTVT TTEHENALLR SFDKFTTYFS GFYENRKNVF |
| 181 | SAEDISTAIP HRIVQDNFPK FKENCHIFTR LITAVPSLRE HFENVKKAIG IFVSTSIEEV |
| 241 | FSFPFYNQLL TQTQIDLYNQ LLGGISREAG TEKIKGLNEV LNLAIQKNDE TAHIIASLPH |
| 301 | RFIPLFKQIL SDRNTLSFIL EEFKSDEEVI QSFCKYKTLL RNENVLETAE ALFNELNSID |
| 361 | LTHIFISHKK LETISSALCD HWDTLRNALY ERRISELTGK ITKSAKEKVQ RSLKHEDINL |
| 421 | QEIISAAGKE LSEAFKQKTS EILSHAHAAL DQPLPTTLKK QEEKEILKSQ LDSLLGLYHL |
| 481 | LDWFAVDESN EVDPEFSARL TGIKLEMEPS LSFYNKARNY ATKKPYSVEK FKLNFQMPTL |
| 541 | ASGWDVNKEK NNGAILFVKN GLYYLGIMPK QKGRYKALSF EPTEKTSEGF DKMYYDYFPD |
| 601 | AAKMIPKCST QLKAVTAHFQ THTTPILLSN NFIEPLEITK EIYDLNNPEK EPKKFQTAYA |
| 661 | KKTGDQKGYR EALCKWIDFT RDFLSKYTKT TSIDLSSLRP SSQYKDLGEY YAELNPLLYH |
| 721 | ISFQRIAEKE IMDAVETGKL YLFQIYNKDF AKGHHGKPNL HTLYWTGLFS PENLAKTSIK |
| 781 | LNGQAELFYR PKSRMKRMAH RLGEKMLNKK LKDQKTPIPD TLYQELYDYV NHRLSHDLSD |
| 841 | EARALLPNVI TKEVSHEIIK DRRFTSDKFF FHVPITLNYQ AANSPSKFNQ RVNAYLKEHP |
| 901 | ETPIIGIDRG ERNLIYITVI DSTGKILEQR SLNTIQQFDY QKKLDNREKE RVAARQAWSV |
| 961 | VGTIKDLKQG YLSQVIHEIV DLMIHYQAVV VLENLNFGFK SKRTGIAEKA VYQQFEKMLI |
| 1021 | DKLNCLVLKD YPAEKVGGVL NPYQLTDQFT SFAKMGTQSG FLFYVPAPYT SKIDPLTGFV |
| 1081 | DPFVWKTIKN HESRKHFLEG FDFLHYDVKT GDFILHFKMN RNLSFQRGLP GFMPAWDIVF |
| 1141 | EKNETQFDAK GTPFIAGKRI VPVIENHRFT GRYRDLYPAN ELIALLEEKG IVFRDGSNIL |
| 1201 | PKLLENDDSH AIDTMVALIR SVLQMRNSNA ATGEDYINSP VRDLNGVCFD SRFQNPEWPM |
| 1261 | DADANGAYHI ALKGQLLLNH LKESKDLKLQ NGISNQDWLA YIQELRN. |

[0242] In some embodiments of the compositions of the disclosure, the sequence encoding the first RNA binding protein comprises a sequence isolated or derived from a CRISPR Cas protein. In some embodiments, the CRISPR Cas protein comprises a Type VI CRISPR Cas protein or portion thereof. In some embodiments, the Type VI CRISPR Cas protein comprises a Cas13 protein or portion thereof. Exemplary Cas13 proteins of the disclosure may be isolated or derived from any species, including, but not limited to, a bacteria or an archaea. Exemplary Cas13 proteins of the disclosure may be isolated or derived from any species, including, but not limited to, Leptotrichia wadei, Listeria seeligeri serovar 1/2b (strain ATCC 35967/DSM 20751/CIP 100100/SLCC 3954), Lachnospiraceae bacterium, Clostridium aminophilum DSM 10710, Carnobacterium gallinarum DSM 4847, Paludibacter propionicigenes WB4, Listeria weihenstephanensis FSL R9-0317, Listeria weihenstephanensis FSL R9-0317, bacterium FSL M6-0635 (Listeria newyorkensis), Leptotrichia wadei F0279, Rhodobacter capsulatus SB 1003, Rhodobacter capsulatus R121, Rhodobacter capsulatus DE442 and Corynebacterium ulcerans. Exemplary Cas13 proteins of the disclosure may be DNA nuclease inactivated. Exemplary Cas13 proteins of the disclosure include, but are not limited to, Cas13a, Cas13b, Cas13c, Cas13d and orthologs thereof. Exemplary Cas13b proteins of the disclosure include, but are not limited to, subtypes 1 and 2 referred to herein as Csx27 and Csx28, respectively.

[0243] Exemplary Cas13a proteins include, but are not limited to:

| Cas13a | Cas13a | | | |
|---|---|---|---|---|
| number | abbreviation | Organism name | Accession number | Direct Repeat sequence |
| Cas13a1 | LshCas13a | Leptotrichia | WP_018451595.1 | CCACCCCAATATCGAAGGGGACTAA |
| | | shahii | | AAC (SEQ ID NO: 175) |
| Cas13a2 | LwaCas13a | Leptotrichia | WP_021746774.1 | GATTTAGACTACCCCAAAAACGAAG |
| | | wadei | | GGGACTAAAAC (SEQ ID NO: 176) |
| Cas13a3 | LseCas13a | Listeria seeligeri | WP_012985477.1 | GTAAGAGACTACCTCTATATGAAAG |
| | | | | AGGACTAAAAC (SEQ ID NO: 177) |
| Cas13a4 | LbmCas13a | Lachnospiraceae | WP_044921188.1 | GTATTGAGAAAAGCCAGATATAGTT |
| | | bacterium | | GGCAATAGAC (SEQ ID NO: 178) |
| | | MA2020 | | |
| Cas13a5 | LbnCas13a | Lachnospiraceae | WP_022785443.1 | GTTGATGAGAAGAGCCCAAGATAG |
| | | bacterium | | AGGGCAATAAC (SEQ ID NO: 179) |
| | | NK4A179 | | |
| Cas13a6 | CamCas13a | [Clostridium] | WP_031473346.1 | GTCTATTGCCCTCTATATCGGGCTGT |
| | | aminophilum | | TCTCCAAAC (SEQ ID NO: 180) |
| | | DSM 10710 | | |
| Cas13a7 | CgaCas13a | Carnobacterium | WP_034560163.1 | ATTAAAGACTACCTCTAAATGTAAG |
| | | gallinarum DSM | | AGGACTATAAC (SEQ ID NO: 181) |
| | | 4847 | | |
| Cas13a8 | Cga2Cas13a | Carnobacterium | WP_034563842.1 | AATATAAACTACCTCTAAATGTAAG |
| | | gallinarum DSM | | AGGACTATAAC (SEQ ID NO: 182) |
| | | 4847 | | |
| Cas13a9 | Pprcas13a | Paludibacter | WP_013443710.1 | CTTGTGGATTATCCCAAAATTGAAG |
| | | propionicigenes | | GGAACTACAAC (SEQ ID NO: 183) |
| | | WB4 | | |
| Cas13a10 | LweCas13a | Listeria | WP_036059185.1 | GATTTAGAGTACCTCAAAATAGAAG |
| | | weihenstephanensis | | AGGTCTAAAAC (SEQ ID NO: 184) |
| | | FSL R9-0317 | | |
| Cas13a11 | LbfCas13a | Listeriaceae | WP_036091002.1 | GATTTAGAGTACCTCAAAACAAAAG |
| | | bacterium FSL | | AGGACTAAAAC (SEQ ID NO: 185) |
| | | M6-0635 | | |
| | | (Listeria | | |
| | | newyorkensis) | | |
| Cas13a12 | Lwa2cas13a | Leptotrichia | WP_021746774.1 | GATATAGATAACCCCAAAAACGAA |
| | | wadei F0279 | | GGGATCTAAAAC (SEQ ID NO: 186) |
| Cas13a13 | RcsCas13a | Rhodobacter | WP_013067728.1 | GCCTCACATCACCGCCAAGACGACG |
| | | capsulatus SB | | GCGGACTGAAC (SEQ ID NO: 187) |
| | | 1003 | | |
| Cas13a14 | RcrCas13a | Rhodobacter | WP_023911507.1 | GCCTCACATCACCGCCAAGACGACG |
| | | capsulatus R121 | | GCGGACTGAAC (SEQ ID NO: 188) |
| Cas13a15 | RcdCas13a | Rhodobacter | WP_023911507.1 | GCCTCACATCACCGCCAAGACGACG |
| | | capsulatus | | GCGGACTGAAC (SEQ ID NO: 189) |
| | | DE442 | | |

[0244] Exemplary wild type Cas13a proteins of the disclosure may comprise or consist of the amino acid sequence:

| (SEQ ID NO: 190) | |
|---|---|
| 1 | MGNLFGHKRW YEVRDKKDFK IKRKVKVKRN YDGNKYILNI NENNNKEKID NNKFIRKYIN |
| 61 | YKKNDNILKE FTRKFHAGNI LFKLKGKEGI IRIENNDDFL ETEEVVLYIE AYGKSEKLKA |
| 121 | LGITKKKIID EAIRQGITKD DKKIEIKRQE NEEEIEIDIR DEYTNKTLND CSIILRIIEN |
| 181 | DELETKKSIY EIFKNINMSL YKIIEKIIEN ETEKVFENRY YEEHLREKLL KDDKIDVILT |
| 241 | NFMEIREKIK SNLEILGFVK FYLNVGGDKK KSKNKKMLVE KILNINVDLT VEDIADFVIK |
| 301 | ELEFWNITKR IEKVKKVNNE FLEKRRNRTY IKSYVLLDKH EKFKIERENK KDKIVKFFVE |
| 361 | NIKNNSIKEK IEKILAEFKI DELIKKLEKE LKKGNCDTEI FGIFKKHYKV NFDSKKFSKK |
| 421 | SDEEKELYKI IYRYLKGRIE KILVNEQKVR LKKMEKIEIE KILNESILSE KILKRVKQYT |
| 481 | LEHIMYLGKL RHNDIDMTTV NTDDFSRLHA KEELDLELIT FFASTNMELN KIFSRENINN |
| 541 | DENIDFFGGD REKNYVLDKK ILNSKIKIIR DLDFIDNKNN ITNNFIRKFT KIGTNERNRI |
| 601 | LHAISKERDL QGTQDDYNKV INIIQNLKIS DEEVSKALNL DVVFKDKKNI ITKINDIKIS |
| 661 | EENNNDIKYL PSFSKVLPEI LNLYRNNPKN EPFDTIETEK IVLNALIYVN KELYKKLILE |
| 721 | DDLEENESKN IFLQELKKTL GNIDEIDENI IENYYKNAQI SASKGNNKAI KKYQKKVIEC |
| 781 | YIGYLRKNYE ELFDFSDFKM NIQEIKKQIK DINDNKTYER ITVKTSDKTI VINDDFEYII |
| 841 | SIFALLNSNA VINKIRNRFF ATSVWLNTSE YQNIIDILDE IMQLNTLRNE CITENWNLNL |
| 901 | EEFIQKMKEI EKDFDDFKIQ TKKEIFNNYY EDIKNNILTE FKDDINGCDV LEKKLEKIVI |
| 961 | FDDETKFEID KKSNILQDEQ RKLSNINKKD LKKKVDQYIK DKDQEIKSKI LCRIIFNSDF |
| 1021 | LKKYKKEIDN LIEDMESENE NKFQEIYYPK ERKNELYIYK KNLFLNIGNP NFDKIYGLIS |
| 1081 | NDIKMADAKF LFNIDGKNIR KNKISEIDAI LKNLNDKLNG YSKEYKEKYI KKLKENDDFF |
| 1141 | AKNIQNKNYK SFEKDYNRVS EYKKIRDLVE FNYLNKIESY LIDINWKLAI QMARFERDMH |
| 1201 | YIVNGLRELG IIKLSGYNTG ISRAYPKRNG SDGFYTTTAY YKFFDEESYK KFEKICYGFG |
| 1261 | IDLSENSEIN KPENESIRNY ISHFYIVRNP FADYSIAEQI DRVSNLLSYS TRYNNSTYAS |
| 1321 | VFEVFKKDVN LDYDELKKKF KLIGNNDILE RLMKPKKVSV LELESYNSDY IKNLIIELLT |
| 1381 | KIENTNDTL |

[0245] Exemplary Cas13b proteins include, but are not limited to:

| Species | Cas13b Accession | Cas13b Size (aa) |
|---|---|---|
| Paludibacter propionicigenes WB4 | WP_013446107.1 | 1155 |
| Prevotella sp. P5-60 | WP_044074780.1 | 1091 |
| Prevotella sp. P4-76 | WP_044072147.1 | 1091 |
| Prevotella sp. P5-125 | WP_044065294.1 | 1091 |
| Prevotella sp. P5-119 | WP_042518169.1 | 1091 |
| Capnocytophaga canimorsus Cc5 | WP_013997271.1 | 1200 |
| Phaeodactylibacter xiamenensis | WP_044218239.1 | 1132 |
| Porphyromonas gingivalis W83 | WP_005873511.1 | 1136 |
| Porphyromonas gingivalis F0570 | WP_021665475.1 | 1136 |
| Porphyromonas gingivalis ATCC 33277 | WP_012458151.1 | 1136 |
| Porphyromonas gingivalis F0185 | ERJ81987.1 | 1136 |
| Porphyromonas gingivalis F0185 | WP_021677657.1 | 1136 |
| Porphyromonas gingivalis SJD2 | WP_023846767.1 | 1136 |
| Porphyromonas gingivalis F0568 | ERJ65637.1 | 1136 |
| Porphyromonas gingivalis W4087 | ERJ87335.1 | 1136 |
| Porphyromonas gingivalis W4087 | WP_021680012.1 | 1136 |
| Porphyromonas gingivalis F0568 | WP_021663197.1 | 1136 |
| Porphyromonas gingivalis | WP_061156637.1 | 1136 |
| Porphyromonas gulae | WP_039445055.1 | 1136 |
| Bacteroides pyogenes F0041 | ERI81700.1 | 1116 |
| Bacteroides pyogenes JCM 10003 | WP_034542281.1 | 1116 |
| Alistipes sp. ZOR0009 | WP_047447901.1 | 954 |
| Flavobacterium branchiophilum FL-15 | WP_014084666.1 | 1151 |
| Prevotella sp. MA2016 | WP_036929175.1 | 1323 |
| Myroides odoratimimus CCUG 10230 | EHO06562.1 | 1160 |
| Myroides odoratimimus CCUG 3837 | EKB06014.1 | 1158 |
| Myroides odoratimimus CCUG 3837 | WP_006265509.1 | 1158 |
| Myroides odoratimimus CCUG 12901 | WP_006261414.1 | 1158 |
| Myroides odoratimimus CCUG 12901 | EHO08761.1 | 1158 |
| Myroides odoratimimus (NZ_CP013690.1) | WP_058700060.1 | 1160 |
| Bergeyella zoohelcum ATCC 43767 | EKB54193.1 | 1225 |
| Capnocytophaga cynodegmi | WP_041989581.1 | 1219 |
| Bergeyella zoohelcum ATCC 43767 | WP_002664492.1 | 1225 |
| Flavobacterium sp. 316 | WP_045968377.1 | 1156 |
| Psychroflexus torquis ATCC 700755 | WP_015024765.1 | 1146 |
| Flavobacterium columnare ATCC 49512 | WP_014165541.1 | 1180 |
| Flavobacterium columnare | WP_060381855.1 | 1214 |
| Flavobacterium columnare | WP_063744070.1 | 1214 |
| Flavobacterium columnare | WP_065213424.1 | 1215 |
| Chryseobacterium sp. YR477 | WP_047431796.1 | 1146 |
| Riemerella anatipestifer ATCC 11845 = DSM | WP_004919755.1 | 1096 |
| 15868 | | |
| Riemerella anatipestifer RA-CH-2 | WP_015345620.1 | 949 |
| Riemerella anatipestifer | WP_049354263.1 | 949 |
| Riemerella anatipestifer | WP_061710138.1 | 951 |
| Riemerella anatipestifer | WP_064970887.1 | 1096 |
| Prevotella saccharolytica F0055 | EKY00089.1 | 1151 |
| Prevotella saccharolytica JCM 17484 | WP_051522484.1 | 1152 |
| Prevotella buccae ATCC 33574 | EFU31981.1 | 1128 |
| Prevotella buccae ATCC 33574 | WP_004343973.1 | 1128 |
| Prevotella buccae D17 | WP_004343581.1 | 1128 |
| Prevotella sp. MSX73 | WP_007412163.1 | 1128 |
| Prevotella pallens ATCC 700821 | EGQ18444.1 | 1126 |
| Prevotella pallens ATCC 700821 | WP_006044833.1 | 1126 |
| Prevotella intermedia ATCC 25611 = DSM 20706 | WP_036860899.1 | 1127 |
| Prevotella intermedia | WP_061868553.1 | 1121 |
| Prevotella intermedia 17 | AFJ07523.1 | 1135 |
| Prevotella intermedia | WP_050955369.1 | 1133 |
| Prevotella intermedia | BAU18623.1 | 1134 |
| Prevotella intermedia ZT | KJJ86756.1 | 1126 |
| Prevotella aurantiaca JCM 15754 | WP_025000926.1 | 1125 |
| Prevotella pleuritidis F0068 | WP_021584635.1 | 1140 |
| Prevotella pleuritidis JCM 14110 | WP_036931485.1 | 1117 |
| Prevotella falsenii DSM 22864 = JCM 15124 | WP_036884929.1 | 1134 |
| Porphyromonas gulae | WP_039418912.1 | 1176 |
| Porphyromonas sp. COT-052 OH4946 | WP_039428968.1 | 1176 |
| Porphyromonas gulae | WP_039442171.1 | 1175 |
| Porphyromonas gulae | WP_039431778.1 | 1176 |
| Porphyromonas gulae | WP_046201018.1 | 1176 |
| Porphyromonas gulae | WP_039434803.1 | 1176 |
| Porphyromonas gulae | WP_039419792.1 | 1120 |
| Porphyromonas gulae | WP_039426176.1 | 1120 |
| Porphyromonas gulae | WP_039437199.1 | 1120 |
| Porphyromonas gingivalis TDC60 | WP_013816155.1 | 1120 |
| Porphyromonas gingivalis ATCC 33277 | WP_012458414.1 | 1120 |
| Porphyromonas gingivalis A7A1-28 | WP_058019250.1 | 1176 |
| Porphyromonas gingivalis JCVI SC001 | EOA10535.1 | 1176 |
| Porphyromonas gingivalis W50 | WP_005874195.1 | 1176 |
| Porphyromonas gingivalis | WP_052912312.1 | 1176 |
| Porphyromonas gingivalis AJW4 | WP_053444417.1 | 1120 |
| Porphyromonas gingivalis | WP_039417390.1 | 1120 |
| Porphyromonas gingivalis | WP_061156470.1 | 1120 |

[0246] Exemplary wild type Bergeyella zoohelcum ATCC 43767 Cas13b (BzCas13b) proteins of the disclosure may comprise or consist of the amino acid sequence:

| (SEQ ID NO: 191) | |
|---|---|
| 1 | menktslgnn iyynpfkpqd ksyfagyfna amentdsvfr elgkrlkgke ytsenffdai |
| 61 | fkenislvey eryvkllsdy fpmarlldkk evpikerken fkknfkgiik avrdlrnfyt |
| 121 | hkehgeveit deifgvldem lkstvltvkk kkvktdktke ilkksiekql dilcqkkley |
| 181 | lrdtarkiee krrnqrerge kelvapfkys dkrddliaai yndafdvyid kkkdslkess |
| 241 | kakyntksdp qqeegdlkip iskngvvfll slfltkqeih afkskiagfk atvideatvs |
| 301 | eatvshgkns icfmatheif shlaykklkr kvrtaeinyg eaenaeqlsv yaketlmmqm |
| 361 | ldelskvpdv vyqnlsedvq ktfiedwney lkenngdvgt meeeqvihpv irkryedkfn |
| 421 | yfairfldef aqfptlrfqv hlgnylhdsr pkenlisdrr ikekitvfgr lselehkkal |
| 481 | fikntetned rehyweifpn pnydfpkeni svndkdfpia gsildrekqp vagkigikvk |
| 541 | llnqqyvsev dkavkahqlk qrkaskpsiq niieeivpin esnpkeaivf ggqptaylsm |
| 601 | ndihsilyef fdkwekkkek lekkgekelr keigkelekk ivgkiqaqiq qiidkdtnak |
| 661 | ilkpyqdgns taidkeklik dlkqeqnilq klkdeqtvre keyndfiayq dknreinkvr |
| 721 | drnhkqylkd nlkrkypeap arkevlyyre kgkvavwlan dikrfmptdf knewkgeqhs |
| 781 | llqkslayye qckeelknll pekvfqhlpf klggyfqqky lyqfytcyld krleyisglv |
| 841 | qqaenfksen kvfkkvenec fkflkkqnyt hkeldarvqs ilgypifler gfmdekptii |
| 901 | kgktfkgnea lfadwfryyk eyqnfqtfyd tenyplvele kkqadrkrkt kiyqqkkndv |
| 961 | ftllmakhif ksvfkqdsid qfsledlyqs reerlgnqer arqtgerntn yiwnktvdlk |
| 1021 | lcdgkitven vklknvgdfi kyeydqrvqa flkyeeniew qaflikeske eenypyvver |
| 1081 | eieqyekvrr eellkevhli eeyilekvkd keilkkgdnq nfkyyilngl lkqlknedve |
| 1141 | sykvfnlnte pedvninqlk qeatdleqka fvltyirnkf ahnqlpkkef wdycqekygk |
| 1201 | iekektyaey faevfkkeke alik. |

[0247] In some embodiments of the compositions of the disclosure, the sequence encoding the first RNA binding protein, or RNA-guided target RNA binding protein, comprises a sequence isolated or derived from a CasRX/Cas13d protein. CasRX/Cas13d is an effector of the type VI-D CRISPR-Cas systems. In some embodiments, the CasRX/Cas13d protein is an RNA-guided RNA endonuclease enzyme that can cut or bind RNA. In some embodiments, the CasRX/Cas13d protein can include one or more higher eukaryotes and prokaryotes nucleotide-binding (HEPN) domains. In some embodiments, the CasRX/Cas13d protein can include either a wild-type or mutated HEPN domain. In some embodiments, the CasRX/Cas13d protein includes a mutated HEPN domain that cannot cut RNA but can process guide RNA. In some embodiments, the CasRX/Cas13d protein does not require a protospacer flanking sequence.

[0248] Exemplary CasRX/Cas13d proteins may comprise or consist of the sequence:

### CasRX/Cas13d Gut_metagenome_contig6049000251:

| (SEQ ID NO: 54) | |
|---|---|
| LYLTSFGKGN AAVIEQKIEP ENGYRVTGMQ ITPSITVNKA TDESVRFRVK RKIAQKDEFI | 60 |
| ADNPMHEGRH RIEPSAGSDM LGLKTKLEKY YFGKEFDDNL HIQIIYNILD IEKILAVYST | 120 |
| NITA. | 124 |

[0250] Exemplary CasRX/Cas13d proteins may comprise or consist of the sequence:

### CasRX/Cas13d Gut_metagenome_contig546000275:

| (SEQ ID NO: 57) | |
|---|---|
| MDSYRPKLYK LIDFCIFKHY HEYTEISEKN VDTLRAAVSE EQKESFYADE AKRLWGIFDK | 60 |
| QFLGFCKKIN VWVNGSHEKE ILGYIDKDAY RKKSDVSYFS KFLYAMSFFL DGKEINDLLT | 120 |
| TLINKFDNIA SFISTAKELD AEIDRILEKK LDPVTGKPLK GKNSFRNFIA NNVIENKRFI | 180 |
| YVIKFCNPKN VLKLVKNTKV TEFVLKRMPE SQIDRYYSSC IDTEKNPSVD KKISDLAEMI | 240 |
| KKIAFDDFRN VRQKTRTREE SLEKERFKAV IGLYLTVVYL LIKNLVNVNS RYVMAFHCLE | 300 |
| RDAKLYGINI GKNYIELTED LCRENENSRS AYLARNKRLR DCVKQNIDNA KNMKSKEK. | 358 |

[0252] Exemplary CasRX/Cas13d proteins may comprise or consist of the sequence:

### CasRX/Cas13d Gut_metagenome_contig4114000374:

| (SEQ ID NO: 61) | |
|---|---|
| DTKINPQTWL YQLENTPDLD NEYRDTLDHF FDERFNEINE HFVTQNATNL CIMKEVFPDE | 60 |
| DFKSIADLYY DFIVVKSYKN IGFSIKKLRE KMLELPEAKR VTSTEMDSVR SKLYKLIDFC | 120 |
| IFKHYHEKPE TVEMIVSMLR AYTSEDMKE. | 149 |

[0254] Exemplary CasRX/Cas13d proteins may comprise or consist of the sequence:

### CasRX/Cas13d Gut_metagenome_contig721000619:

| (SEQ ID NO: 67) | |
|---|---|
| KEGSTMAKNE KKKSTAKALG LKSSFVVNND IYMTSFGKGN KAVLEKKITE NTIENKSDTT | 60 |
| YFDVINRDPK GFTLEGRRIA DMTAFSNDPK YHVNVVNGKF LEDQLGARSE LEKKVFGRTF | 120 |
| DDNVHIQLIH NILDIEKIMA QYVSDIVYLL HNTIKRDMND DIMGYISIRN SFDDFCHPER | 180 |
| IPDRKAKDNL QKQHDIFFDE ILKCGRLAYF GNAFFEDGSD NKEIAKLKRY KEIYHIIALM | 240 |
| GSLRQSYFHG ENSDKNFQGP TWAYTLESNL TGKYKEFKDT LDKTFDERYE MISKDFGSTN | 300 |
| MVNLQILEEL LKMLYGNVSP. | 320 |

[0256] Exemplary CasRX/Cas13d proteins may comprise or consist of the sequence:

### CasRX/Cas13d Gut_metagenome_contig2002000411:

| (SEQ ID NO: 69) | |
|---|---|
| EKQNKAKYQA IISLYLMVMY QIVKNMIYVN SRYVIAFHCL ERDSNQLLGR FNSRDASMYN | 60 |
| KLTQKFITDK YLNDGAQGCS KKVGNYLSHN ITCCSDELRK EYRNQVDHFA VVRMIGKYAA | 120 |
| DIGKFSTWFE LYHYVMQRII FDKRNPLSET ERTYKQLIAK HHTYCKDLVK ALNTPFGYNL | 180 |
| ARYKNLSIGE LFDRNNYNAK TKET. | 204 |

[0258] Exemplary CasRX/Cas13d proteins may comprise or consist of the sequence:

### CasRX/Cas13d Gut_metagenome_contig13552000311:

| (SEQ ID NO: 71) | |
|---|---|
| LIDFLIYDLY YNRKPARIEE IVDKLRESVN DEEKESIYSA ETKYVYEALG KVLVRSLKKY | 60 |
| LNGATIRDLK NRYDAKTANR IWDISEHSKS GHVNCFCKLI YMMTLMLDGK EINDLLTTLV | 120 |
| NKFDNIASFI DVMDELGLEH SFTDNYKMFA DSKAICLDLQ FINSFARMSK IDDEKSKRQL | 180 |
| FRDALVVLDI GDKNEDWIEK YLTSDIFKRD ENGNKIDGEK RDFRNFIANN VIKSARFKYL | 240 |
| VKYSSADGMI KLKKNEKLIS FVLEQLPETQ IDRYYESCGL DCAVADRKVR IEKLTGLIRD | 300 |
| MRFDNFRGVN YSNDACKKDK QAKAKYQAII SLYLMVLYQI VKNMIYVNSR YVIAFHCLER | 360 |
| DLLFFNIELD NSYQYSNCNE LTEKFIKDKY MKEGALGFNM KAGRYLTKNI GNCSNELRKI | 420 |
| YRNQVDHFAV VRKIGNYAAD IASVGSWFE. | 449 |

[0260] Exemplary CasRX/Cas13d proteins may comprise or consist of the sequence:

### CasRX/Cas13d Gut_metagenome_contig10037000527:

| (SEQ ID NO: 72) | |
|---|---|
| YMDQNFANSD AWAIHVYRNK IQHLDAVRHA DMYIGDIREF HSWFELYHYI IQRRIIDQYA | 60 |
| YESTPGSSRD GSAIIDEERL NPATRRYFRL ITTYKT. | 96 |

[0262] Exemplary CasRX/Cas13d proteins may comprise or consist of the sequence:

### CasRX/Cas13d Gut_metagenome_contig238000329:

| (SEQ ID NO: 73) | |
|---|---|
| RYDKDRSKIY TMMDFVIYRY YIDNNNDSID FINKLRSSID EKSKEKLYNE EANRLWNKLK | 60 |
| EYMLYIKEFN GKLASRTPDR DGNISEFVES LPKIHRLLPR GQKISNFSKL MYLLTMFLDG | 120 |
| KEINDLLTTL INKFENIQGF LDIMPEINVN AKFEPEYVFF NKSHEIAGEL KLIKGFAQMG | 180 |
| EPAATLKLEM TADAIKILGT EKEDAELIKL AESLFKDENG KLLGNKQHGM RNFIGNNVIK | 240 |
| SKRFHYLIRY GDPAHLHKIA TNKNVVRFVL GRIADMQKKQ GQKGKNQIDR YYEVCVGNKD | 300 |
| IKKTIEEKID ALTDIIVNMN YDQFEKKKAV IENQNRGKTF EEKNKYKRDN AEREKFKKII | 360 |
| SLYLTVIYHI LKNIVNVNSR YILGFHCLER DKQLYIEKYN KDKLDGFVAL TKFCLGDEER | 420 |
| YEDLKAKAQA SIQALETANP KLYAKYMNYS DEEKKEEFKK QLNRERVKNA RNAYLKNIKN | 480 |
| YIMIRLQLRD QTDSSGYLCG EFRDKVAHLE VARHAHEYI. | 519 |

[0264] Exemplary CasRX/Cas13d proteins may comprise or consist of the sequence:

### CasRX/Cas13d Gut_metagenome_contig2643000492:

| (SEQ ID NO: 84) | |
|---|---|
| NGEIVSLAEK EAFSAKIADK NIGCKIENKQ FRHPKGYDVI ADNPIYKGSP RQDMLGLKET | 60 |
| LEKRYFSPSD SIDNVRVQVA HNILDIEKIL AEYITNAVYS FDNIAGFGKD IIGDDFSPVY | 120 |
| TYDKFEKSDR YEYFKNLLNN SRLGYYGQAF FECDDSKENK KKKDAIKCYN IIALLSGLRH | 180 |
| W. | 181 |

[0266] Exemplary CasRX/Cas13d proteins may comprise or consist of the sequence:

### CasRX/Cas13d Gut_metagenome_contig874000057:

| (SEQ ID NO: 85) | |
|---|---|
| MSKNKESYAK GMGLKSALVS GSKVYMTSFE GGNDAKLEKV VENSEIVSLA EKESFSAEIF | 60 |
| KKNIGCKIEN KKFKHPKRYD VIADNPLYKG SVRQDMLGLK ETLEKRYFNS ADGTDNVCIQ | 120 |
| VIHNILDIEK ILAEYITNAV YSFDNIAGFG EDIIGMGGFK PIYTYKQFKE PDKYNKKFDD | 180 |
| ILNNSRLGYY GKAFFEKNDL KHNPNKKKRD KNPYILKYDN ECYYIIALLS GLRHWNIHSH | 240 |
| AKDDLVSYRW LYNLDSILNR EYISTLNYLY DDIADELTES FSKNSSANVN YIAETLNIDP | 300 |
| SEFAQQYFRF SIMKEQKNMG FNVSKLREIM LDRKELSDIR DNHRVFDSIR SKLYTMMDFV | 360 |
| IYRYYIEEAA KTEAENRNLP ENEKKISEKD FFVINLRGSF DENQKEKLYI EEAKRLWEKL | 420 |
| KDIMLKIKEF RGEKVKEYKK. | 440 |

[0268] Exemplary CasRX/Cas13d proteins may comprise or consist of the sequence:

### CasRX/Cas13d Gut_metagenome_contig4781000489:

| (SEQ ID NO: 86) | |
|---|---|
| LDKQLDYEYI RTLNYMFNDI ADELTRTFSK NSAANVNYIA ETLNIDPNKF AEQYFRFSIM | 60 |
| KEQKNLGFNL TKLRESMLDR RELSDIRDNH NVFDSIRPKL YTMMDFVIYK HYIDEAKKTE | 120 |
| AENKSLPDDR KNLSEKD. | 137 |

[0270] Exemplary CasRX/Cas13d proteins may comprise or consist of the sequence:

### CasRX/Cas13d Gut_metagenome_contig12144000352:

| (SEQ ID NO: 87) | |
|---|---|
| RMGEPVANTK RVMMIDAVKI LGTDLSDDEL KEMADSFFKD SDGNLLKKGK HGMRNFITNN | 60 |
| VIKNKRFHYL IRYGDPAHLH EIAKNEA. | 87 |

[0272] Exemplary CasRX/Cas13d proteins may comprise or consist of the sequence:

### CasRX/Cas13d Gut_metagenome_contig5590000448:

| (SEQ ID NO: 88) | |
|---|---|
| VHNNEEKDLI KYTWLYNLDK YLDAEYITTL NYMYNDIGDE LTDSFSKNSA ANINYIAETL | 60 |
| GIDPKTFAEQ YFRFSIMKEQ KNLGFNLTKL REVMLDRKDM SEIRENHNDF DSIRAKVYTM | 120 |
| MDFVIYRYYI EEAAKVNAAN KSLPDNEKSL SEKDIFVISL RGSFNEDQKD RLYYDEAQRL | 180 |
| WSKVGKLMLK IKKFRGKDTR KYKNMGTPRI RRLIPEGRDI STFSKLMYAL TMFLDGKEIN | 240 |
| DLLTTLINKF DNIQSFLKVM PLIGVNAKFA EEYSFFNNSE KIADELRLIK SFARMGEPVA | 300 |
| DARRAMYIDA IRILGTDLSD DELKALADSF SLDENGNKLG KGKHGMRNFI INNVITNKRF | 360 |
| HYLIRYGNPV HLHEIAKNEA VVKFVLGRIA DIQKKQGQNG KNQIDRYYET CIGK. | 414 |

[0274] Exemplary CasRX/Cas13d proteins may comprise or consist of the sequence:

### CasRX/Cas13d Gut_metagenome_contig525000349:

| (SEQ ID NO: 89) | |
|---|---|
| MSKKENRKSY VKGLGLKSTL VSDSKVYLTT FADGSNAKLE KCVENNKIIC ISNDKEAFAA | 60 |
| SIANKNVGYK IKNDEKFRHP KGYDIISNNP LLHNNSVQQD MLGLKNVLEK RYFGKSSGGD | 120 |
| NNLCIQIIHN IIDIEKILSE YIPNVVYAFN NIAGFKDEHN NIIDIIGTQT YNSSYTYADF | 180 |
| SKDKSDKKYI EFQKLLKNKR LGYWGKAFFT GQGNNAKVRQ ENQCFHIIAL LISLRNWATH | 240 |
| SNELDKHTKR TWLYKLDDTN ILNAEYVKTL NYLYDTIADE LTKSFSKNGA VNVNYLAKKY | 300 |
| NIKDDLPGFS EQYFRFSIMK EQKNLGFNIS KLRENMLDFK DMSVI. | 345 |

[0276] Exemplary CasRX/Cas13d proteins may comprise or consist of the sequence:

### CasRX/Cas13d Gut_metagenome_contig7229000302:

| (SEQ ID NO: 90) | |
|---|---|
| KKISSLTKFC LGESDEKKLK ALAKKSLEEL KTTNSKLYEN YIKYSDERKA EEAKRQINRE | 60 |
| RAKTAMNAHL RNTKWNDIMY GQLKDLADSK SRICSEFRNK AAHLEVARYA HMYINDISEV | 120 |
| KSYFRLYHYI MQRRIIDVIE NNPKAKYEGK VKVYFEDVKK NKKYNKNLLK LMCVPFGYCI | 180 |
| PRFKNLSIEQ MFDMNETDNS DKKKEK. | 206 |

[0278] Exemplary CasRX/Cas13d proteins may comprise or consist of the sequence:

### CasRX/Cas13d Gut_metagenome_contig3227000343:

| (SEQ ID NO: 91) | |
|---|---|
| IGDISEVNSY FQLYHYIMQR ILIDKIGSKT TGKAKEYFDS VIVNKKYDDR LLKLLCSPLG | 60 |
| YCLTRYKDLS IEALFDMNEA AKYDKLNKER KNKKK. | 95 |

[0280] Exemplary CasRX/Cas13d proteins may comprise or consist of the sequence:

### CasRX/Cas13d Gut_metagenome_contig7030000469:

| (SEQ ID NO: 92) | |
|---|---|
| SIRSKLYTMM DFVIYRYYIE ESAKAAAENK PSESDSFVIR LRGSFNENQK EELYIEEAER | 60 |
| LWKKFGEIML KIKEFRGEKV KEYKKEVPRI ERILPHGKDI SAFSKLMYML SMFLD. | 115 |

[0282] Exemplary CasRX/Cas13d proteins may comprise or consist of the sequence:

CasRX/Cas13d gut_metagenome_P17E0k2120140920,_c87000043:

| (SEQ ID NO: 93) | |
|---|---|
| MYFSKMIYML TYFLDGKEIN DLLTTLISKF DNIKEFLKIM KSSAVDVECE LTAGYKLFND | 60 |
| SQRITNELFI VKNIASMRKP AASAKLTMFR DALTILGIDD KITDDRISEI LKLKEKGKGI | 120 |
| HGLRNFITNN VIESSRFVYL IKYANAQKIR EVAKNEKVVM FVLGGIPDTQ IERYYKSCVE | 180 |
| FPDMNSSLEA KRSELARMIK NISFDDFKNV KQQAKGRENV AKERAKAVIG LYLT. | 234 |

[0283] Exemplary CasRX/Cas13d proteins may comprise or consist of the sequence:

CasRX/Cas13d Metagenomic Hit (No Protein Accession): Contig emb|OBVH01003037.1, Human Gut Metagenome Sequence (Also Found in WGS Contigs emb|OBXZ01000094.1| and emb|OBJF01000033.1|):

| (SEQ ID NO: 94) | |
|---|---|
| MAKKKRITAK ERKQNHRELL MKKADSNAEK EKAKKPVVEN KPDTAISKDN TPKPNKEIKK | 60 |
| SKAKLAGVKW VIKANDDVAY ISSFGKGNNS VLEKRIMGDV SSNVNKDSHM YVNPKYTKKN | 120 |
| YEIKNGFSSG SSLVTYPNKP DKNSGMDALC LKPYFEKDFF GHIFTDNMHI QAIYNIFDIE | 180 |
| KILAKHITNI IYTVNSFDRN YNQSGNDTIG FGLNYRVPYS EYGGGKDSNG EPKNQSKWEK | 240 |
| RDNFIKFYNE SKPHLGYYEN IFYDHGEPIS EEKFYNYLNI LNFIRNNTFH YKDDDIELYS | 300 |
| ENYSEEFVFI NCLNKFVKNK FKNVNKNFIS NEKNNLYIIL NAYGKDTENV EVVKKYSKEL | 360 |
| YKLSVLKTNK NLGVNVKKLR ESAIEYGYCP LPYDKEKEVA KLSSVKHKLY KTYDFVITHY | 420 |
| LNSNDKLLLE IVETLRLSKN DDEKENVYKK YAEKLFKADD VINPIKAISK LFARKGNKLF | 480 |
| KEKIIIKKEY IEDVSIDKNI YDFTKVIFFM TCFLDGKEIN DLLTNIISKL QVIEDHNNVI | 540 |
| KFISNNKDAV YKDYSDKYAI FRNAGKIATE LEAIKSIARM ENKIENAPQE PLLKDALLSL | 600 |
| GVSDDTKVLE NTYNKYFDSK EKTDKQSQKV STFLMNNVIN NNRFKYVIKY INPADINGLA | 660 |
| KNRYLVKFVL SKIPEEQIDS YYKLFSNEEE PGCEEKIKLL TKKISKLNFQ TLFENNKIPN | 720 |
| VEKEKKKAII TLYFTIVYIL VKNLVNINGL YTLALYFVER DGYFYKDICG KKDKKKSYND | 780 |
| VDYLLLPEIF SGSKYREETK NLKLPKEKDR DIMKKYLPND KDREKYNKFF TAYRNNIVHL | 840 |
| NIIAKLSELT KNIDKDINSY FDIYHYCTQR VMFNYCKEKN DVVLAKMKDL AHIKSDCNEF | 900 |
| SSKHTYPFSS AVLRFMNLPF AYNVPRFKNL SYKKFFDKQ. | 939 |

[0284] Exemplary CasRX/Cas13d proteins may comprise or consist of the sequence:

CasRX/Cas13d Metagenomic Hit (No Protein Accession): Contig tpg|DJXD01000002.1| (Uncultivated Ruminococcus Assembly, UBA7013, from Sheep Gut Metagenome):

| (SEQ ID NO: 95) | |
|---|---|
| MKKQKSKKTV SKTSGLKEAL SVQGTVIMTS FGKGNMANLS YKIPSSQKPQ NLNSSAGLKN | 60 |
| VEVSGKKIKF QGRHPKIATT DNPLFKPQPG MDLLCLKDKL EMHYFGKTFD DNIHIQLIYQ | 120 |
| ILDIEKILAV HVNNIVFTLD NVLHPQKEEL TEDFIGAGGW RINLDYQTLR GQTNKYDRFK | 180 |
| NYIKRKELLY FGEAFYHENE RRYEEDIFAI LTLLSALRQF CFHSDLSSDE SDHVNSFWLY | 240 |
| QLEDQLSDEF KETLSILWEE VTERIDSEFL KTNTVNLHIL CHVFPKESKE TIVRAYYEFL | 300 |
| IKKSFKNMGF SIKKLREIML EQSDLKSFKE DKYNSVRAKL YKLFDFIITY YYDHHAFEKE | 360 |
| ALVSSLRSSL TEENKEEIYI KTARTLASAL GADFKKAAAD VNAKNIRDYQ KKANDYRISF | 420 |
| EDIKIGNTGI GYFSELIYML TLLLDGKEIN DLLTTLINKF DNIISFIDIL KKLNLEFKFK | 480 |
| PEYADFFNMT NCRYTLEELR VINSIARMQK PSADARKIMY RDALRILGMD NRPDEEIDRE | 540 |
| LERTMPVGAD GKFIKGKQGF RNFIASNVIE SSRFHYLVRY NNPHKTRTLV KNPNVVKFVL | 600 |
| EGIPETQIKR YFDVCKGQEI PPTSDKSAQI DVLARIISSV DYKIFEDVPQ SAKINKDDPS | 660 |
| RNFSDALKKQ RYQAIVSLYL TVMYLITKNL VYVNSRYVIA FHCLERDAFL HGVTLPKMNK | 720 |
| KIVYSQLTTH LLTDKNYTTY GHLKNQKGHR KWYVLVKNNL QNSDITAVSS FRNIVAHISV | 780 |
| VRNSNEYISG IGELHSYFEL YHYLVQSMIA KNNWYDTSHQ PKTAEYLNNL KKHHTYCKDF | 840 |
| VKAYCIPFGY VVPRYKNLTI NELFDRNNPN PEPKEEV. | 877 |

[0285] An exemplary direct repeat sequence of CasRX/Cas13d Metagenomic hit (no protein accession): contig tpg|DJXD01000002.1| (uncultivated Ruminococcus assembly, UBA7013, from sheep gut metagenome) (SEQ ID NO: 95) comprises or consists of the nucleic acid sequence:

### CasRX/Cas13d DR:

(SEQ ID NO: 96)

| | |
|---|---|
| caactacaac cccgtaaaaa tacggggttc tgaaac. | 36 |

[0287] Exemplary CasRX/Cas13d proteins may comprise or consist of the sequence:

CasRX/Cas13d Metagenomic hit (no protein accession): contig OGZC01000639.1 (human gut metagenome assembly):

| (SEQ ID NO: 97) | |
|---|---|
| MKKKNIRATR EALKAQKIKK SQENEALKKQ KLAEEAAQKR REELEKKNLA QWEETSAEGR | 60 |
| RSRVKAVGVK SVFVVGDDLY LATFGNGNET VLEKKITPDG KITTFPEEET FTAKLKFAQT | 120 |
| EPTVATSIGI SNGRIVLPEI SVDNPLHTTM QKNTIKRSAG EDILQLKDVL ENRYFDRSFN | 180 |
| DDLHIRLIYN ILDIEKILAE YTTNAVFAID NVSGCSDDFL SNFSTRNQWD EFQNPEQHRE | 240 |
| HFGNKDNVIC SVKKQQDLFF NFFKNNRIGY FGKAFFHAES ERKIVKKTEK EVYHILTLIG | 300 |
| SLRQWITHST EGGISRLWLY QLEDALSREY QETMNNCYNS TIYGLQKDFE KTNAPNLNFL | 360 |
| AEILGKNASE LAEPYFRFII TKEYKNLGFS IKTLREMLLD QPDLQEIREN HNVYDSIRSK | 420 |
| LYKMIDFVLV YAYSNERKSK ADALASNLRS AITEDAKKRI YQNEADQLWT SYQELFKRIR | 480 |
| GFKGAQVKEY SSKNMPIPIQ KQIQNILKPA EQVTYFTKLM YLLTMFLDGK EINDLLTTLI | 540 |
| NKFDNISSLL KTMEQLELQT TFKEDYTFFQ QSSRLCKEIT QLKSFARMGN PISNLKEVMM | 600 |
| VDAIQILGTE KSEQELQSMA CFFFRDKNGK KLNTGEHGMR NFIGNNVISN TRFQYLIRYG | 660 |
| NPQKLHTLSQ NETVVRFVLS RIAKNQRVQG MNGKNQIDRY YETCGGTNSW SVSEEEKINF | 720 |
| LCKILTNMSY DQFQDVKQSG AEITAEEKRK KERYKAIISL YLTVLYQLIK NLVNINARYI | 780 |
| IAFHCLERDA ILYSSKFNTS INLKKRYTAL TEMILGYETD EKARRKDTRT VYEKAEAAKN | 840 |
| RHLKNVKWNC KTRENLENAD KNAIVAFRNI VAHLWIIRDA DRFITGMGAM KRYFDCYHYL | 900 |
| LQRELGYILE KSNQGSEYTK KSLEKVQQYH SYCKDFLHML CLPFAYCIPR YKNLSIAELF | 960 |
| DRHEPEAEPK EEASSVNNSQ FITT. | 984 |

[0288] Exemplary CasRX/Cas13d proteins may comprise or consist of the sequence:

CasRX/Cas13d Metagenomic Hit (No Protein Accession): Contig emb|OHBM01000764.1 (Human Gut Metagenome Assembly):

| (SEQ ID NO: 98) | |
|---|---|
| XXXXXXXXXX XXXXXXXXXX XXXXXXXXXX XXXXXXXXXX XXXXXXXXXX XXXXXXXXXX | 60 |
| XXXXXXXXXX XXXXXXXXXX XXXXXXXXXX XXXXXXXXXX XXXXXXXXXX XXXXXXXXXX | 120 |
| XXXXXXXXXX XXXXXXXXXX XXXXXXXXXX XXXXXXXXXX XXXXXXXXXX XXXXXXXXXX | 180 |
| XXXXXXXXXX XXXXXXXXXX XXXXXXXXXX XXXXXXXXXX XXHPLQKRYR YLTSTNLKSF | 240 |
| ETYKNNLVNK KKFDLDRVKK IPQLAYFGSA FYNTPEDTSA KITKTKIKSN EEIYYTFMLL | 300 |
| STARNFSAHY LDRNRAKSSD AEDFDGTSVI MYNLDNEELY KKLYNKKVHM ALTGMKKVLD | 360 |
| ANFNKKVEHL NNSFIKNSAK DFVILCEVLG IKSRDEKTKF VKDYYDFVVR KNYKHLGFSV | 420 |
| KELRELLFAN HDSNKYIKEF DKISNKKFDS VRSRLNRLAD YIIYDYYNKN NAKVSDLVKY | 480 |
| LRAAADDEQK KKIYLNESIN LVKSGILERI KKILPKLNGK IIGNMQPDST ITASMLHNTG | 540 |
| KDWHPISENA HYFTKWIYTL TLFMDGKEIN DLVTTLINKF DNIASFIEVL KSQSVCTHFS | 600 |
| EERKMFIDSA EICSELSAMN SFARMEAPGA SSKRAMFVEA ARILGDNRSK EELEEYFDTL | 660 |
| FDKSASKKEK GFRNFIRNNV VDSNRFKYLT RYTDTSSVKA FSNNKALVKF AIKDIPQEQI | 720 |
| LRYYNSCFGA SERYYNDGMS DKLVEAIGKI NLMQFNGVIQ QADRNMLPEE KKKANAQKEK | 780 |
| YKSIIRLYLT VCYLFFKNLV YVNSRYYSAF YNLEKDRSLF EINGELKPTG KFDEGHYTGL | 840 |
| VKLFIDNGWI NPRASAYLTV NLANSDETAI RTFRNTAEHL EALRNADKYL NDLKQFDSYF | 900 |
| EIYHYITQRN IKEKCEMLKE QTVKYNNDLL KYHGYSKDFV KALCVPFGYN LPRFKNLSID | 960 |
| ALFDKNDKRE KLKKGFED. | 978 |

[0289] Exemplary CasRX/Cas13d proteins may comprise or consist of the sequence:

CasRX/Cas13d Metagenomic Hit (No Protein Accession): Contig emb|OHCP01000044.1 (Human Gut Metagenome Assembly):

| (SEQ ID NO: 99) | |
|---|---|
| MAKKITAKQK REEKERLNKQ KWAKNDSVII VPETKEEIKT GEIQDNNRKR SRQKSQAKAM | 60 |
| GLKAVLSFDN KIAIASFVSS KNAKSSHIER ITDKEGTTIS VNSKMFESSV NKRDINIEKR | 120 |
| ITIEEPQQDG TIKKEEKGVK STTCNPYFKV GGKDYIGIKE IAEEHFFGRA FPNENLRVQI | 180 |
| AYNIFDVQKI LGTFVNNIIY SFYNLSRDEV QSDNDVIGML YSISDYDRQK ETETFLQAKS | 240 |
| LLKQTEAYYA YFDDVFKKNK KPDKNKEGDN SKQYQENLRH NFNILRVLSF LRQICMHAEV | 300 |
| HVSDDEGCTR TQNYTDSLEA LFNISKAFGK KMPELKTLID NIYSKGINAI NDEFVKNGKN | 360 |
| NLYILSKVYP NEKREVLLRE YYNFVVCKEG SNIGISTRKL KETMIAQNMP SLKEENTYRN | 420 |
| KLYTVMNFIL VRELKNCATI REQMIKELRA NMDEEEGRDR IYSKYAKEIY LYVKDKLKLM | 480 |
| LNVFKEEAEG IIIPGKEDPV KFSHGKLDKK EIESFCLTTK NTEDITKVIY FLCKFLDGKE | 540 |
| INELCCAMMN KLDGISDLIE TAKQCGEDVE FVDQFKCLSK CATMSNQIRI VKNISRMKKE | 600 |
| MTIDNDTIFL DALELLGRKI EKYQKDKNGD YVKDEKGKKV YTKDYNNFQD MFFEGKNHRV | 660 |
| RNFVSNNVIK SKWFSYVVRY NKPAECQALM RNSKLVKFAL DELPDSQIEK YYISVFGEKS | 720 |
| SSSNEEMRRE LLKKLCDFSV RGFLDEIVLL SEDEMKQKDK FSEKEKKKSL IRLYLTIVYL | 780 |
| ITKSMVKINT RFSIACATYE RDYILLCQSE KAERAWEKGA TAFALTRKFL NHDKPTFEQY | 840 |
| YTREREISAM PQEKRKELRK ENDQLLKKTH YSKHAYCYIV DNVNNLTGAV ANDNGRGLPC | 900 |
| LSEKNDNANL FLEMRNKIVH LNVVHDMVKY INEIKNITSY YAFFCYVLQR MIIGNNSNEQ | 960 |
| NKFKAKYSKT LQEFGTYSKD LMWVLNLPFA YNLPRYKNLS NEQLFYDEEE RMEKIVGRKN | 1020 |
| DSR. | 1023 |

[0290] Exemplary CasRX/Cas13d proteins may comprise or consist of the sequence:

CasRX/Cas13d Metagenomic Hit (No Protein Accession): Contig emb|OGDF01008514.1| (Human Gut Metagenome Assembly):

| (SEQ ID NO: 100) | |
|---|---|
| MTETKPKRED IAKTPAAKSR SKAAGLKSTF AVNGSVLLTS FGRGNDAVPE KLITEKAVSE | 60 |
| INTVKPRFSV EKPATSYSSS FGIKSHISAT ADNPLAGRAP VGEDAIHAKE VLEQRVFGKT | 120 |
| FSDDNIHIQL IYNILDIRKI LSTYANNVVF TINSMRRLDE YDREQDYLGY LYTGNSYERL | 180 |
| LDIADKYAVD GEDWRNTAAG ISNDFEKKQF QTINGFWDLL DMIEPYMCYF SEAFFCETTV | 240 |
| KDPDSGRIVP CLEQRSDGDI YNILRILSIV RQTCMHDNAS MRTVMFTLGQ NSVRDRKNGF | 300 |
| DELAELLDYL YDEKIDIVNR DFLRNQKNNI ELLSRIYGSS ADSPERDRLV QNFYDFRVLS | 360 |
| QDKNLGFSIK KLREKLLDSP ALSVVRSKKY DTMRSKIYSL IDFMIYRKFS ENHVAVDDFV | 420 |
| EELRSLLTED EKESAYSRWA ETLINDGFAQ EILVKLLPQT DPAVIGKIKG KKLLNDSIAG | 480 |
| IKLKKDASFF TKIINVLCMF QDGKEINELV SSLVNKFANI QSFVDVMRSQ GIDSGFTADY | 540 |
| AMFAESGRIS RELHILKGIA RMQHSIAGLG DVKIYGSDDK FHGVSRRVYT DAAYILGFGE | 600 |
| RSEDNDGYVD DYVSSKLLGG ADKNLRNFIT NNVIKNRRFL YTVRYMNPKR AKKLVQNDAL | 660 |
| VVLALSGIPE TQIDRYYKSC IEKRSFNPDL NEKIAALSEM ITTLKIDDFE DVKQNPEKNA | 720 |
| NYEAKKNQRI SKERYKACIG LYLTVLYLIC KNLVKINARY SIAIGCLERD TQLHGVDFKG | 780 |
| AAYMTRDVFI AKGWINPKKP TVKSIKEQYA FLTPYIFTTY RNMIAHLAAV TNAYKYIPQM | 840 |
| DRFKSWFHLY HTVIQHSLIQ QYEYDRDYGR KGAPVVSERV LQLLEQCREH SNYSRDLLHI | 900 |
| LNLPFGYNLP RYLNLSSEKY FDANAI. | 926 |

[0291] Exemplary CasRX/Cas13d proteins may comprise or consist of the sequence:

CasRX/Cas13d Metagenomic Hit (No Protein Accession): Contig emb|OGPN01002610.1 (Human Gut Metagenome Assembly):

| (SEQ ID NO: 101) | |
|---|---|
| MAKKITAKQK REEKERLNKQ KWAKQDTPVV PKSKTEEKPV AASDDKLLKT TQVKKVQTKS | 60 |
| KAKAMGLKTV LSFDDKIAIA SFVNDKKTKL PHIERITDKS GTTIHENARM FDSSVDEQNV | 120 |
| NIEKRMTIEE KQNDGTFKKD EKDVKATICN PYFKTCGKDY IGIKDVAEKY FFGKTFPNEN | 180 |
| LRVQIAYNVF DIQKILGTYV NNIIYSFYNL RRDGKSDVDI IGSLYAFADF DNQLKDKPAF | 240 |
| REAKDLLKNT EAYFSYFGDV FKKSKKGKKD ENNEDYEKNL RHNFNVLRVL SFLRQICTHA | 300 |
| YVKCTGGAKN NGDSTKVEAE SLDALFNITE YFAKTAPELS KTINEIYKEG IDRINNDFVT | 360 |
| NGKNNLYILS KVYPDMQRNE LVKKYYQFVV CKEGNNVGIN TRKLKESIIS QHPWITTPQD | 420 |
| NNKANDYESC RHKLYTIMCF ILVAELDAHE SIRDNMVAEL RANMDGDDGR DAIYEKYAKD | 480 |
| IYHIVKDKLL AMQKVFDEEL VPVKVEGKND PQQFTHGKLG KKEIESFCLS DKNTSDIAKV | 540 |
| VYFLCNFLDG KEINELCCAM MNKFDGIGDL IDTAKQCGEE VKFIEEFACL SNCRKITNDI | 600 |
| RVAKSISKMK NKVNIDNDII YLDAIELLGR KIEKYQKDEN GKILLGTDGK RLYTQEYKYF | 660 |
| NDMFFNAGNH KVRNFIANNV MQSKWFFYVV RYNKPAECQI IMRNKTLVKF TLDDLPDMQI | 720 |
| QRYYSSVFGD NNMPAVDEMR KRLLDKINQF SVRGFLDELD EIVLMSDEES KRNKSSEKEQ | 780 |
| KKSLIRLYLT IAYLITKSMV KINTRFSIAC AMYERDYALL CQSEMKGGPW DGGAQALAVT | 840 |
| RKFLNHDREV FDRYCAREAE IARLPSEERK PLRKANDKLL KQTHYTNHSY TYIVNNLNSF | 900 |
| TDIDYCAKDV GLPAPNDKND NASILGEMRN DIAHLNIVHD MVKYIEELKD ISSYYAFYCY | 960 |
| VLQRRLVGKD PNCQNKFKAK YAKELNDYGT YNKNLMWMLN LPFAYNLPRY KNLSSEFLFY | 1020 |
| DMEYNKKDDE. | 1030 |

[0292] Exemplary CasRX/Cas13d proteins may comprise or consist of the sequence:

CasRX/Cas13d Metagenomic Hit (No Protein Accession): From Contig emb|OBLI01020244 and emb|OBLI01038679 (from Pig Gut Metagenome):

| (SEQ ID NO: 102) | |
|---|---|
| MAKKITAKQR REERERQNKQ KWAKKQADAT AVFECEADIK PADSKDEDCT NIYIKREKKK | 60 |
| TQAKAMGLKT VLGFDNKIAI ASFMSSKDSK SSHIERITDP NGKTIREDVR MFDSNVDECS | 120 |
| INLEKRMTVE ERQKDGTIKK DEKDVKSTIC NPYSNECGKD YIGIKSVAEE LFFGRTFPND | 180 |
| NLRVQIAYNI FDIQKILGTY INNIIYSFYN LSRDESQSDN DVIGTLYMLK DFDGQKETDT | 240 |
| FRQARALLER TEAYYSYFDN VFKKIDKNKK KSDDCKRERN EILRYNFNVL RVLSFLRQIC | 300 |
| AHAQVKISNE HDREKGGGLV DSLDALFNIS RFFDAVAPEL NEVINSVYSK GIDDINDNFV | 360 |
| KNGKNNFYIL SKIYPEVARE DLLREYYYFV VSKEGNNIGI STKKLKEAII VQDMSYIKSE | 420 |
| DYDTYRNKLY TVLCFILVKE LNERTTIREQ MVADLRANMN GDIGREDIYS KYAKIIYAQV | 480 |
| KPRFDTMKSA FEEEAKDVIV PDKKKPVKFS HGKLDKNEIE RFCITSANTD SVAKIIYFLC | 540 |
| KFLDGKEINE LCCAMMNKLD GINDLIETAE QCGAKVEFVD KFSVLSNCET ISDQIRIVKS | 600 |
| ISKMKKEIAI DNDTIFLDAL ELLGRKIDKY KKDATGKYLK DENGKYLYSK EYDDFQYMFF | 660 |
| KDSHRVRNFI SNSVIKSKWF SYIVRYNQPS ECRAIMKNKT LVKFALDELP DLQIQRYFVA | 720 |
| LYGDEDLPSY GEMRKILLKK LHDFSIKGFL DEIVLLSDLD MESQDKYCEK EQKKSLFRLY | 780 |
| LTIAYLITKS MVKINTRFSI ACATYERDYA LLCASNKQER AWSSGATALA LTRRFLNQDK | 840 |
| LIFEKHYARE GEISKLPKEE RKAMRKVNDQ LLKRTHFSKH SYCYIVDNVN RLTGGECRTD | 900 |
| KRVLPVLNEK NDNAGILLDF RKTIAHLNVV HKMVDYVDEI KGITSYYAFF CYVLQRMLVG | 960 |
| NNLNEKNAIK EKYSATVKSF GTYSKDFMWL INLPFAYNLP RYKNLSNEQL FYDEEERNET | 1020 |
| EEQIDRL. | 1027 |

[0293] Exemplary CasRX/Cas13d proteins may comprise or consist of the sequence:

### CasRX/Cas13d Metagenomic Hit (No Protein Accession): Contig OIZX01000427.1:

| (SEQ ID NO: 103) | |
|---|---|
| MAKKKKTARQ LREEMQQQRK QAIQKQQEQR QEKAAAARET AAPEQPAAAP VPKRQRKSLA | 60 |
| KAAGLKSNFI LDPQRRTTVM TAFGQGSTAI LEKQIVDRAI SDLQPVQQFQ VEPASAAKYR | 120 |
| LKNSRVRFPN VTADDPLYRR KDGGFVPGMD ALRRKNVLEQ RFFGKSFADN IHIQMIYSIL | 180 |
| DIHKILAAAS GHIVHLLNIV NGSKDRDFIG MLAAHVLYNE LNEEAKRSIA DFCKSPRLIY | 240 |
| YSAAFYETLD NGKSERRSNE DIFNILALMT CLRNFSSHHS IAIKVKDYSA AGLYNLRRLG | 300 |
| PDMKKMLDTF YTEAFIQLNQ SFQDHNTTNL TCLFDILNIS DSARQKQLAE EFYRYVVFKE | 360 |
| QKNLGFSVRK LREEMLLLPD AAVIADKRYD TCRSKLYNLM DFLILRVYRT GRADRCDKLP | 420 |
| EALRAALTDE EKAVVYHKEA LSLWNEMRTL ILDGLLPQMT PENLSRLSGQ KRKGELSLDD | 480 |
| AMLKECLYEP GPVPEDAAPE EANAEYFCRM IYLATLFMDG KEINTLLTTL ISKFENIAAF | 540 |
| LQTMEQLNIE AELGPEYAMF TRSRAVAEQL RVINSFALMK KPQVNAKQQL YRAAVTLLGT | 600 |
| EDPDGVTDEM LCIDPVTGKM LPPNQRHHGD TGLRNFIANN VVESRRFQYL IRYSDPAQLH | 660 |
| QLASNKKLVR FVLSSIPDTQ INRYYETCGQ TRLAGRAAKV EFLTDMIAAI RFDQFRDVNQ | 720 |
| KERGANTQKE RYKAMLGLYQ TVLYLAVKNL VNINARYVMA FHCVERDMFL YDGELTDPKG | 780 |
| ESVSAFLAVN GKKGVQPQYL LLTQLFIRRD YLKRSACEQI QHNMENISDR LLREYRNAVA | 840 |
| HLNVIAHLAD YSADMREITS YYGLYHYLMQ RHLFKRHAWQ IRQPERPTEE EQKLIEQEQK | 900 |
| QLAWEKALFD KTLQYHSYNK DLVKALNAPF GYNLARYKNL SIEPLFSKEA APAAEIKATH | 960 |
| A. | 961 |

[0295] Exemplary CasRX/Cas13d proteins may comprise or consist of the sequence:

### CasRX/Cas13d Metagenomic Hit (No Protein Accession): Contig OCTW011587266.1:

| (SEQ ID NO: 104) | |
|---|---|
| MKQNDRENNN KIKKSAAKAV GVKSLARLSD GSTVVSSFGK GAAAELESLI TGGEIRKLSD | 60 |
| KAILEITDDT QNKNAYNVKS SRIPNLTART DKLSDKSGMD DLGFKRELEL EVFGQCFDDS | 120 |
| IHIQIAHAVF DIQKSLAAVI PNVLYTLNNL DRSYSTDNTS DKKDIIGNTL NYQHSYESFN | 180 |
| VEKRGEFTEY YNAAKDRFSY FPDILCVLEK VNGKDRYQPK SEKDAFNVLS SVNMLRNSLF | 240 |
| HFAPKSNDGK ARIAVFKNQF DSDFSHITST VNKIYSAKIA GVNENFLNNE GNNLYIILKA | 300 |
| TNWDIKKIVP QLYRFSVLKS DKNMGFNMRK LREFAVESKN IDLSRLNDKF LTNNRKKLYK | 360 |
| VIDFIIYYHL NKVLKDSFVD DFVAALRASQ SEEEKEKLYA QYSERLFADE GLKSAIKKAV | 420 |
| DMISDTKSNI FKMKTPLDKA LIENIKVNSD ASDFCKLIYV FTRFLDGKEI NILLNSLIKK | 480 |
| FQDIHSFNTT VKKLSENNLI INADYVDDYS LFEQSGTVAR ELMLIKSISK MDFGLDNINL | 540 |
| SFMYDDALRT LGVSDENLPE VKREYFGKTK NLSAYIRNNV LENRRFKYVI KYIHPSDVQK | 600 |
| IACNKAIAGF VLNRMPDTQI KRYYDSLINK GATDIQAQAK ALLDCITGIS FDAIKDDKHL | 660 |
| HKSKEKSPQR SADRERKKAM LTLYYTIVYI FVKQMLHINS LYTIGFFYLE RDQRFIYSRA | 720 |
| KKENKNPSKN SYLNDFRSVT AYFIPSEIMK RIEKNENKGF LEDFEALWNS CGKTSRLRKE | 780 |
| DVLLYARYIS PDHALKNYKM ILNSYRNKIA HINVIMSAGK YTGGIKRMDS YFSVFQHLVQ | 840 |
| CDILSNPNNK GKCFESESLK PLLLDMKFDG TDEKLYSKRL TRALNIPFGY NVPRYKNLTF | 900 |
| EKIYLKSSIN E. | 911 |

[0297] Exemplary CasRX/Cas13d proteins may comprise or consist of the sequence:

CasRX/Cas13d Metagenomic Hit (No Protein Accession): Contig emb|OGNF01009141.1:

| (SEQ ID NO: 105) | |
|---|---|
| MADIDKKKSS AKAAGLKSTF VLENNKLLMT SFGNGNKAVI EKIIDEKVDS INEPEVFSVT | 60 |
| PCDKKFELQP AKRGLAADSL VDNPLKSKKT AGDDAIHSRK FLERQFFDGN TFNDNIHIQL | 120 |
| IYNILDIEKI LSVHVNDIVY SVNNILSRGE GMEYNDYIGT LNLKSFETYK NNLVNKKKFD | 180 |
| LDRVKKIPQL AYFGSAFYNT PEDTSAKITK TKIKSNEEIY YTFMLLSTAR NFSAHYLDRN | 240 |
| RAKSSDAEDF DGTSVIMYNL DNEELYKKLY NKKVHMALTG MKKVLDANFN KKVEHLNNSF | 300 |
| IKNSAKDFVI LCEVLGIKSR DEKTKFVKDY YDFVVRKNYK HLGFSVKELR ELLFANHDSN | 360 |
| KYIKEFDKIS NKKFDSVRSR LNRLADYIIY DYYNKNNAKV SDLVKYLRAA ADDEQKKKIY | 420 |
| LNESINLVKS GILERIKKIL PKLNGKIIGN MQPDSTITAS MLHNTGKDWH PISENAHYFT | 480 |
| KWIYTLTLFM DGKEINDLVT TLINKFDNIA SFIEVLKSQS VCTHFSEERK MFIDSAEICS | 540 |
| ELSAMNSFAR MEAPGASSKR AMFVEAARIL GDNRSKEELE EYFDTLFDKS ASKKEKGFRN | 600 |
| FIRNNVVDSN RFKYLTRYTD TSSVKAFSNN KALVKFAIKD IPQEQILRYY NSCFGASERY | 660 |
| YNDGMSDKLV EAIGKINLMQ FNGVIQQADR NMLPEEKKKA NAQKEKYKSI IRLYLTVCYL | 720 |
| FFKNLVYVNS RYYSAFYNLE KDRSLFEING ELKPTGKFDE GHYTGLVKLF IDNGWINPRA | 780 |
| SAYLTVNLAN SDETAIRTFR NTAEHLEALR NADKYLNDLK QFDSYFEIYH YITQRNIKEK | 840 |
| CEMLKEQTVK YNNDLLKYHG YSKDFVKALC VPFGYNLPRF KNLSIDALFD KNDKREKLKK | 900 |
| GFED. | 904 |

[0298] Exemplary CasRX/Cas13d proteins may comprise or consist of the sequence:

CasRX/Cas13d Metagenomic Hit (No Protein Accession): Contig emb|OIEN01002196.1:

| (SEQ ID NO: 106) | |
|---|---|
| MERQKRKMKS KSKMAGVKSV FVIGDELLMT SFGDGDDAVL EKDIDENGVV NDCRNPAAYD | 60 |
| AVYGTDSIRV KKTNNNIRAK VNNPLAKSNI RSEESALFRT RVNEYKREQK DKYETLFFGK | 120 |
| TFDDNIHIQL ISKILDIEKT FSVVIGNIVY AINNLSLEQS IDRPIDIFGD KNTQGISLRE | 180 |
| DNDYLKTMLP RCEYLFHNIL NSDSDNNSKM NYNKVNKGKE EKDNRNNENI EKLKKALEVI | 240 |
| KIIRVDSFHG VDGIKGDQKF PRSKYNLAVN YNEEIQKTIS EPFNRKVEEV QQDFYRNSCV | 300 |
| NIDFLKEIMY GSNYTDRGSD SLECSYFNFA ILKQNKNMGF SITSIRECLL DLYELNFESM | 360 |
| QNLRPRANSF CDFLIYDYYC KNESERANLV DCLRSAASEE EKKNIYFQTA ERVKEKFRNA | 420 |
| FNRISRFDAS YIKNSREKNL SGGSSLPKYS FIEGFTKRSK KINDNDEKNA DLFCNMLYYL | 480 |
| AQFLDGKEIN IFLTSIHNIF QNIDSFLKVM KEKGMECKFQ KDFKMFSHAG HVAKKIEIVI | 540 |
| SLAKMKKTLD FYNAQALKDA VTILGVSKKH QYLDMNSYLD FYMFDNRSGA TGKNAGKDHN | 600 |
| LRNFLVSNVI RSRKFNYLSR YSNLAEVKKL AQNPSLVQFV LSRIEPSLIC RYYESSQGIS | 660 |
| SEGITIDEQI KKLTGIIVDM NIDSFENINN GEIGMRYSKA TPQSIERRNQ MRVCVGLYLN | 720 |
| VLYQIEKNLM NVNARYVLAF AFAERDALML NFTLEECKKN KKRSSGGFSF IEMTQFFIDK | 780 |
| KLFKVATEAI KKNVLKYNGN PESLNHIPGE YICKNMEGYH ENTVRNFRNM VAHLTAVARV | 840 |
| PLYISEVTQI DSYYALYHYC MQMNILQGIE QSGKILDNIK LKNALENARV HRTYSKDAVK | 900 |
| YLCLPFAYNI SRYKALTIKD LFDWTEYSCK KDE. | 933 |

[0299] Exemplary CasRX/Cas13d proteins may comprise or consist of the sequence:

CasRX/Cas13d Metagenomic Hit (No Protein Accession): Contig e-k87_11092736:

| (SEQ ID NO: 107) | |
|---|---|
| MKRQKTFAKR IGIKSTVAYG QGKYAITTFG KGSKAEIAVR SADPPEETLP TESDATLSIH | 60 |
| AKFAKAGRDG REFKCGDVDE TRIHTSRSEY ESLISNPAES PREDYLGLKG TLERKFFGDE | 120 |
| YPKDNLRIQI IYSILDIQKI LGLYVEDILH FVDGLQDEPE DLVGLGLGDE KMQKLLSKAL | 180 |
| PYMGFFGSTD VFKVTKKREE RAAADEHNAK VFRALGAIRQ KLAHFKWKES LAIFGANANM | 240 |
| PIRFFQGATG GRQLWNDVIA PLWKKRIERV RKSFLSNSAK NLWVLYQVFK DDTDEKKKAR | 300 |
| ARQYYHFSVL KEGKNLGFNL TKTREYFLDK FFPIFHSSAP DVKRKVDTFR SKFYAILDFI | 360 |
| IYEASVSVAN SGQMGKVAPW KGAIDNALVK LREAPDEEAK EKIYNVLAAS IRNDSLFLRL | 420 |
| KSACDKFGAE QNRPVFPNEL RNNRDIRNVR SEWLEATQDV DAAAFVQLIA FLCNFLEGKE | 480 |
| INELVTALIK KFEGIQALID LLRNLEGVDS IRFENEFALF NDDKGNMAGR IARQLRLLAS | 540 |
| VGKMKPDMTD AKRVLYKSAL EILGAPPDEV SDEWLAENIL LDKSNNDYQK AKKTVNPFRN | 600 |
| YIAKNVITSR SFYYLVRYAK PTAVRKLMSN PKIVRYVLKR LPEKQVASYY SAIWTQSESN | 660 |
| SNEMVKLIEM IDRLTTEIAG FSFAVLKDKK DSIVSASRES RAVNLEVERL KKLTTLYMSI | 720 |
| AYIAVKSLVK VNARYFIAYS ALERDLYFFN EKYGEEFRLH FIPYELNGKT CQFEYLAILK | 780 |
| YYLARDEETL KRKCEICEEI KVGCEKHKKN ANPPYEYDQE WIDKKKALNS ERKACERRLH | 840 |
| FSTHWAQYAT KRDENMAKHP QKWYDILASH YDELLALQAT GWLATQARND AEHLNPVNEF | 900 |
| DVYIEDLRRY PEGTPKNKDY HIGSYFEIYH YIRQRAYLEE VLAKRKEYRD SGSFTDEQLD | 960 |
| KLQKILDDIR ARGSYDKNLL KLEYLPFAYN LPRYKNLTTE ALFDDDSVSG KKRVAEWRER | 1020 |
| EKTREAEREQ RRQR. | 1034 |

[0300] An exemplary direct repeat sequence of CasRX/Cas13d Metagenomic hit (no protein accession): contig e-k87_11092736 (SEQ ID NO: 107) comprises or consists of the nucleic acid sequence:

CasRX/Cas13d Direct repeat 1:
(SEQ ID NO: 108)
gtgagaagtc tccttatggg gagatgctac.

[0301] Exemplary CasRX/Cas13d proteins may comprise or consist of the sequence:

### CasRX/Cas13d Ga0129306_1000735:

| (SEQ ID NO: 109) | |
|---|---|
| MQKQREQQTV TDESERKKKP LKSGAKAAGL KSVFVLSEGK ELLTSFGRGN EAVPEKRVTG | 60 |
| GTIANARTDN KEAFSAALQN KRFEVFGRTA GSSDDPLAVS RAPGQDLIGA KTALEERYFG | 120 |
| RAFADNIHMQ VIYAIQDINK ILAVHANNIV YTLNNLDREA DPETDDFIGS GYLTLKNTFE | 180 |
| TYCDPAALNE REREKVTVSK QHFDAFMQNP RLAYYGNAFF RKLSKAERLA RGREIFDKES | 240 |
| PERRQEILGS RGKNKSVDDE IRALAPEWVK REERDVYSEL VLMSELRQSC FHGQQKNSAR | 300 |
| IFRLDNDLGP GVDGARELLD RLYAEKINDL RSFDKTSASS NFRLLFNAYH ADNEKKKELA | 360 |
| QEFYRFSVLK VSKNTGFSIR TLREKIIEDH AAQYRDKIYD SMRKKLFSTF DFFLWRFYEE | 420 |
| REDEAEELRA CLRAARSDEE KEQIYAEAAA SCWPSVKPFV ESVAATLCDV VKGRTKLNKL | 480 |
| KLSADESTLV RNAIDGVRIS PRASYFTKLI YLMTLFLDGK EINDLLTTLI HAFENIDSFL | 540 |
| SVLGSERLER TFDANYRIFA DSGVIAQELR AVNSFARMTT EPFNSKLVMF EDAAQLFGMS | 600 |
| GGLVEHAEEL REYLDNKMLD KTKLRLLPDG KVDTGFRNFI ISNVTESRRF RYLVRYCEPR | 660 |
| AVRDYMSCRP LIRLTLRDMP DTILRRYYEQ SVGAATVDRE RILDTLADKL LSLRFTDFEN | 720 |
| VNQRANAERN REKQKMMGII SLYLNVAYQI VKNLVYVNAR YTMAYHCAER DTELLLNAAG | 780 |
| EGNLLRRDRS WPARLHLPRR ALARRRDRVE VMERDVARGP EAYNRDEWLG LVRTLRREKR | 840 |
| VCDNLHNNYA YLCGADAEPG DASLSLLFVY RNKAAHLSVL NKGGRLSGDL KEAKSWFYVY | 900 |
| HFLMQRVLEE EFRNTQALPE RLRELLMMAE RYRGCSKDLI KVLNLTFAYN LPRYKNLSID | 960 |
| GRFDKNHPDP SDE. | 973 |

[0303] Exemplary CasRX/Cas13d proteins may comprise or consist of the sequence:

### CasRX/Cas13d Ga0129317_1008067:

| (SEQ ID NO: 110) | |
|---|---|
| MKKQKKSLVK AAGLKSAFVV GDSVYLTSFG KGNAARLDTK INPDNSTERY VSDSEKHTLK | 60 |
| INSITDTELR LSGPFPKQAE AKNPTHKKDN EQKNTRQDML GLKSTLEKFY FGSTFDDNIH | 120 |
| IQIIHNIQDI AKILAAHSNN AGYALDNMLA YQGVEFSDMI GYMGTSRTFD NYDPNHKNNK | 180 |
| DFFRFLKLPR LGYFGSAFYS QKGKDFEKRS DEEVYNICAL MGQIRQCCFH GKQEKYQLKW | 240 |
| LYNFHNFKSN KPFLDTLDKH FDEMIDRINK NFIKNNTPDL IILSGLYPDM AKKELVRLFY | 300 |
| DFTTVKEYKN MGFSVKKLRE KMLESEEASD FRDKDYDSVR RKLYKLMDFC IYYLYYSDSE | 360 |
| RNENLVSRLR ESLTDENKDI IYSKEAKIVW NELRKKFSTI LDNVKGSNIK KLENVKEKFI | 420 |
| SEDEFDDIKL DIDISYFSKL MYVMCYFLDG KEINDLLTTL VSKFDNIGSI IEAATQIGIN | 480 |
| IEFIDDFKFF DRSKDISVEL NIIRNFARMQ APVPNAKRAM QEDAIRILGG SEEDIFSILD | 540 |
| DMTGYDKSGK KLAQSKKGFR NFIINNVVES SRFKYIVRYS NPQKIRKLAN NSVVVGFVLG | 600 |
| KLPDAQIESY FNSCLPNRVY STPDKARESL RDMLHNISFN DFADVKQDDR RATPEEKVEK | 660 |
| ERYKAIIGLY LTVMYHLVKN LVYVNSRYVM AFHCLERDAM HYDVSLDNYR DLIRHLISEG | 720 |
| DSSCNHFISH NRRMRDCIEE NVKNSEQLIF GKEDAVIRFR NNVAHLSAIR NANEYIGDIR | 780 |
| EITSYFALYH YLMQRKLIDD CKVNDTAHKY FEQLTKYKTY VMDMVKALCS PFGYNLPRFK | 840 |
| NLSIEGKFDM HESK. | 854 |

[0305] Exemplary CasRX/Cas13d proteins may comprise or consist of the sequence:

### CasRX/Cas13d Ga0224415_10048792:

| (SEQ ID NO: 111) | |
|---|---|
| MSKKENRKSY VKGLGLKSTL VSDSKVYLTT FADGSNAKLE KCVENNKIIC ISNDKEAFAA | 60 |
| SIANKNVGYK IKNDEKFRHP KGYDIISNNP LLHNNSVQQD MLGLKNVLEK RYFGKSSGGD | 120 |
| NNLCIQIIHN IIDIEKILSE YIPNVVYAFN NIAGFKDEHN NIIDIIGTQT YNSSYTYADF | 180 |
| SKDKSDKKYI EFQKLLKNKR LGYWGKAFFT GQGNNAKVRQ ENQCFHIIAL LISLRNWATH | 240 |
| SNELDKHTKR TWLYKLDDTN ILNAEYVKTL NYLYDTIADE LTKSFSKNGA VNVNYLAKKY | 300 |
| NIKDDLPGFS EQYFRFSIMK EQKNLGFNIS KLRENMLDFK DMSVIRDDHN RYDKDRSKIY | 360 |
| TMMDFVIYRY YIDNNNDSID FINKLRSSID EKSKEKLYNE EANRLWNKLK EYMLYIKEFN | 420 |
| GKLASRTPDR DGNISEFVES LPKIHRLLPR GQKISNFSKL MYLLTMFLDG KEINDLLTTL | 480 |
| INKFENIQGF LDIMPEINVN AKFEPEYVFF NKSHEIAGEL KLIKGFAQMG EPAATLKLEM | 540 |
| TADAIKILGT EKEDAELIKL AESLFKDENG KLLGNKQHGM RNFIGNNVIK SKRFHYLIRY | 600 |
| GDPAHLHKIA TNKNVVRFVL GRIADMQKKQ GQKGKNQIDR YYEVCVGNKD IKKTIEEKID | 660 |
| ALTDIIVNMN YDQFEKKKAV IENQNRGKTF EEKNKYKRDN AEREKFKKII SLYLTVIYHI | 720 |
| LKNIVNVNSR YILGFHCLER DKQLYIEKYN KDKLDGFVAL TKFCLGDEER FEDLKAKAQA | 780 |
| SIQALETANP KLYAKYMNYS DEEKKEEFKK QLNRERVKNA RNAYLKNIKN YIMIRLQLRD | 840 |
| QTDSSGYLCG EFRDKVAHLE VARHAHEYIG NIKEVNSYFQ LYHYIMQCRL YDVLKNNTKA | 900 |
| EAMVKGKAKE YFEALEKEGT YNDKLLKIAC VPFGYCIPRY KNLSMEELFD MNEEKKFKKK | 960 |
| APENT. | 965 |

[0307] Exemplary CasRX/Cas13d proteins may comprise or consist of the sequence:

CasRX/Cas13d 160582958_gene49834:

| (SEQ ID NO: 112) | |
|---|---|
| MKNSVTFKLI QAQENKEAAR KKAKDIAEQA RIAKRNGVVK KEENRINRIQ IEIQTQKKSN | 60 |
| TQNAYHLKSL AKAAGVKSVF AIGNDLLMTG FGPGNDATIE KRVFQNRAIE TLSSPEQYSA | 120 |
| EFQNKQFKIK GNIKVLNHST QKMEEIQTEL QDNYNRPHFD LLGCKNVLEQ KYFGRTFSDN | 180 |
| IHVQIAYNIM DIEKLLTPYI NNIIYTLNEL MRDNSKDDFF GCDSHFSVAY LYDELKAGYS | 240 |
| DRLKTKPNLS KNIDRIWNNF CNYMNSDSGN TEARLAYFGE LFYKPKETGD AKSDYKTHLS | 300 |
| NNQKEEWELK SDKEVYNIFA ILCDLRHFCT HGESITPSGK PFPYNLEKNL FPEAKQVLNS | 360 |
| LFEEKAESLG AEAFGKTAGK TDVSILLKVF EKEQASQKEQ QALLKEYYDF KVQKTYKNMG | 420 |
| FSIKKLREAI MEIPDAAKFK DDLYSSLRHK LYGLFDFILV KHFLDTSDSE NLQNNDIFRQ | 480 |
| LRACRCEEEK DQVYRSIAVK VWEKVKKKEL NMFKQVVVIP SLSKDELKQM EMTKNTELLS | 540 |
| SIETISTQAS LFSEMIFMMT YLLDGKEINL LCTSLIEKFE NIASFNEVLK SPQIGYETKY | 600 |
| TEGYAFFKNA DKTAKELRQV NNMARMTKPL GGVNTKCVMY NEAAKILGAK PMSKAELESV | 660 |
| FNLDNHDYTY SPSGKKIPNK NFRNFIINNV ITSRRFLYLI RYGNPEKIRK IAINPSIISF | 720 |
| VLKQIPDEQI KRYYPPCIGK RTDDVTLMRD ELGKMLQSVN FEQFSRVNNK QNAKQNPNGE | 780 |
| KARLQACVRL YLTVPYLFIK NMVNINARYV LAFHCLERDH ALCFNSRKLN DDSYNEMANK | 840 |
| FQMVRKAKKE QYEKEYKCKK QETGTAHTKK IEKLNQQIAY IDKDIKNMHS YTCRNYRNLV | 900 |
| AHLNVVSKLQ NYVSELPNDY QITSYFSFYH YCMQLGLMEK VSSKNIPLVE SLKNEANDAQ | 960 |
| SYSAKKTLEY FDLIEKNRTY CKDFLKALNA PFSYNLPRFK NLSIEALFDK NIVYEQADLK | 1020 |
| KE. | 1022 |

[0308] An exemplary direct repeat sequence of CasRX/Cas13d proteins may comprise or consist of the sequence

[0309] CasRX/Cas13d 160582958_gene49834 (SEQ ID NO: 112) comprises or consists of the nucleic acid sequence:

### CasRX/Cas13d DR:

(SEQ ID NO: 113)
gaactacacc cctctgttct tgtaggggtc taacac.

[0311] Exemplary CasRX/Cas13d proteins may comprise or consist of the sequence:

CasRX/Cas13d 250twins_35838_GL0110300:

| (SEQ ID NO: 114) | |
|---|---|
| MGNKQRVSAQ KRRENAKLCN QQKARQAESQ RDKIKNMNVE KMKNINTNDI KHTKTTAKKL | 60 |
| GLKSTIIADK KIILTSFINE QSSKTANIEK VAGFKGDTID TISYTPRMFR SEINPGEIVI | 120 |
| SKGDDLSEFA NPANFPIGRD YVKIRSALEK QYFGKEFPED NLHVQIAYNV ADIKKILSVY | 180 |
| INNIIYMFYN LARSEEYDIF YNSQSENSGR DCDVIGSLYY QASYRNQDAN RFEKDGKKKA | 240 |
| IDSLLDDTRA YYTYFDGLFS VPKREDDGKI KESEKEKAKD QNFDVLRLLS VGRQLTFHSD | 300 |
| KSNNEAYLFD LSKLTRAAQD ENRRQDIQSL LNILNSTCRS NLEGVNGDFV KHAKNNLYVL | 360 |
| NQLYPSLKAN DLIGEYYNFI VKKENRNIGI RLITVRELII EHNYTNLKDS KYDTYRNKIY | 420 |
| TVLNFILFRE IQENSIAIKN FREKLRSTEK AEQPALYQAF ANKIYPMVQA KFAKAIDLFE | 480 |
| EQYKTKFKSE FKGGISIENM QQQNILLQTE NIDYFSKYVL FLTKFLDGKE INELLCALIN | 540 |
| KFDNIADLLD ISKQIGTPVV FCADYESLND AAKIAENIRL IKNIAHLRPA IQEAQSSKDN | 600 |
| ADAAGTPATL LIDAYNMLNT DIQLVYGEAA YEELRKDLFE RKNGTKYNKK GKKVDVYDHK | 660 |
| FRNFLINNVI KSKWFFYIAK YVKPADCAKM MSNKKMIEFA LRDLPETQIK RYYYTITGNE | 720 |
| ALGDAESLKG VIIEQLHAFS IKNTLLSIKN MGEGEYKIQQ IGSSKEKLKA IVNLYLTVAY | 780 |
| LLTKSLVKVN IRFSIAFGCL ERDLVLQKKS EKKFDAIINE ILLEDDKIRK ECDKERAQAK | 840 |
| TLPRELAQER FAQIKRRESG CYFKSYHVYD YLSKNSNEFK QNHIDFAVTS YRNNVEHLNV | 900 |
| VHCMTKYFSE VKDVKSYYGV YCYIMQRMLC DELIIKNQDK PDVRQTFEEY NRLLKDHGTY | 960 |
| SKNLMWLLNF PFAYNLARYK NLSNEDLFNA KNNDQKSK. | 998 |

[0312] Exemplary CasRX/Cas13d proteins may comprise or consist of the sequence:

CasRX/Cas13d 250twins_36050_GL0158985:

| (SEQ ID NO: 115) | |
|---|---|
| MKKKHQSAAE KRQVKKLKNQ EKAQKYASEP SPLQSDTAGV ECSQKKTVVS HIASSKTLAK | 60 |
| AMGLKSTLVM GDKLVITSFA ASKAVGGAGY KSANIEKITD LQGRVIEEHE RMFSADVGEK | 120 |
| NIELSKNDCH TNVNNPVVTN IGKDYIGLKS RLEQEFFGKT FENDNLHVQL AYNILDIKKI | 180 |
| LGTYVNNIIY IFYNLNRAGT GRDERMYDDL IGTLYAYKPM EAQQTYLLKG DKDMRRFEEV | 240 |
| KQLLQNTSAY YVYYGTLFEK VKAKSKKEQR AKEAEIDACT AHNYDVLRLL SLMRQLCMHS | 300 |
| VAGTAFKLAE SALFNIEDVL SADLKEILDE AFSGAVNKLN DGFVQHSGNN LYVLQQLYPN | 360 |
| ETIERIAEKY YRLTVRKEDL NMGVNIKKLR ELIVGQYFPE VLDKEYDLSK NGDSVVTYRS | 420 |
| KIYTVMNYIL LYYLEDHDSS RESMVEALRQ NREGDEGKEE IYRQFAKKVW NGVSGLFGVC | 480 |
| LNLFKTEKRN KFRSKVALPD VSGAAYMLSS ENIDYFVKML FFVCKFLDGK EINELLCALI | 540 |
| NKFDNIADIL DAAAQCGSSV WFVDSYRFFE RSRRISAQIR IVKNIASKDF KKSKKDSDES | 600 |
| YPEQLYLDAL ALLGDVISKY KQNRDGSVVI DDQGNAVLTE QYKRFRYEFF EEIKRDESGG | 660 |
| IKYKKSGKPE YNHQRRNFIL NNVLKSKWFF YVVKYNRPSS CRELMKNKEI LRFVLRDIPD | 720 |
| SQVRRYFKAV QGEEAYASAE AMRTRLVDAL SQFSVTACLD EVGGMTDKEF ASQRAVDSKE | 780 |
| KLRAIIRLYL TVAYLITKSM VKVNTRFSIA FSVLERDYYL LIDGKKKSSD YTGEDMLALT | 840 |
| RKFVGEDAGL YREWKEKNAE AKDKYFDKAE RKKVLRQNDK MIRKMHFTPH SLNYVQKNLE | 900 |
| SVQSNGLAAV IKEYRNAVAH LNIINRLDEY IGSARADSYY SLYCYCLQMY LSKNFSVGYL | 960 |
| INVQKQLEEH HTYMKDLMWL LNIPFAYNLA RYKNLSNEKL FYDEEAAAEK ADKAENERGE. | 1020 |

[0313] Yan et al. (2018) Mol Cell. 70(2):327-339 (doi: 10.1016/j.molcel.2018.02.2018) and Konermann et al. (2018) Cell 173(3):665-676 (doi: 10.1016/j.cell/2018.02.033) have described CasRX/Cas13d proteins and both of which are incorporated by reference herein in their entireties. Also see WO Publication Nos. WO2018/183703 (CasM) and WO2019/006471 (Cas13d), which are incorporated herein by reference in their entirety.

[0314] Exemplary wild type Cas13d proteins of the disclosure may comprise or consist of the amino acid sequence:

Cas13d (Ruminococcus flavefaciens XPD3002) Sequence:

(SEQ ID NO: 45)

| | |
|---|---|
| 1 | IEKKKSFAKG MGVKSTLVSG SKVYMTTFAE GSDARLEKIV |
| | EGDSIRSVNE GEAFSAEMAD |
| 61 | KNAGYKIGNA KFSHPKGYAV VANNPLYTGP VQQDMLGLKE |
| | TLEKRYFGES ADGNDNICIQ |
| 121 | VIHNILDIEK ILAEYITNAA YAVNNISGLD KDIIGFGKFS |
| | TVYTYDEFKD PEHHRAAFNN |
| 181 | NDKLINAIKA QYDEFDNFLD NPRLGYFGQA FFSKEGRNYI |
| | INYGNECYDI LALLSGLAHW |
| 241 | VVANNEEESR ISRTWLYNLD KNLDNEYIST LNYLYDRITN |
| | ELTNSFSKNS AANVNYIAET |
| 301 | LGINPAEFAE QYFRFSIMKE QKNLGFNITK LREVMLDRKD |
| | MSEIRKNHKV FDSIRTKVYT |
| 361 | MMDFVIYRYY IEEDAKVAAA NKSLPDNEKS LSEKDIFVIN |
| | LRGSFNDDQK DALYYDEANR |
| 421 | IWRKLENIMH NIKEFRGNKT REYKKKDAPR LPRILPAGRD |
| | VSAFSKLMYA LTMFLDGKEI |
| 481 | NDLLTTLINK FDNIQSFLKV MPLIGVNAKF VEEYAFFKDS |
| | AKIADELRLI KSFARMGEPI |
| 541 | ADARRAMYID AIRILGTNLS YDELKALADT FSLDENGNKL |
| | KKGKHGMRNF IINNVISNKR |
| 601 | FHYLIRYGDP AHLHEIAKNE AVVKFVLGRI ADIQKKQGQN |
| | GKNQIDRYYE TCIGKDKGKS |
| 661 | VSEKVDALTK IITGMNYDQF DKKRSVIEDT GRENAEREKF |
| | KKIISLYLTV IYHILKNIVN |
| 721 | INARYVIGFH CVERDAQLYK EKGYDINLKK LEEKGFSSVT |
| | KLCAGIDETA PDKRKDVEKE |
| 781 | MAERAKESID SLESANPKLY ANYIKYSDEK KAEEFTRQIN |
| | REKAKTALNA YLRNTKWNVI |
| 841 | IREDLLRIDN KTCTLFANKA VALEVARYVH AYINDIAEVN |
| | SYFQLYHYIM QRIIMNERYE |
| 901 | KSSGKVSEYF DAVNDEKKYN DRLLKLLCVP FGYCIPRFKN |
| | LSIEALFDRN EAAKFDKEKK |
| 961 | KVSGNS. |

[0315] Exemplary wild type Cas13d proteins of the disclosure may comprise or consist of the amino acid sequence:

Cas13d (contig e-k87_11092736):

(SEQ ID NO: 46)
MKRQKTFAKRIGIKSTVAYGQGKYAITTFGKGSKAEIAVRSADPPEETLP
TESDATLSIHAKFAKAGRDGREFKCGDVDETRIHTSRSEYESLISNPAES
PREDYLGLKGTLERKFFGDEYPKDNLRIQIIYSILDIQKILGLYVEDILH
FVDGLQDEPEDLVGLGLGDEKMQKLLSKALPYMGFFGSTDVFKVTKKREE
RAAADEHNAKVFRALGAIRQKLAHFKWKESLAIFGANANMPIRFFQGATG
GRQLWNDVIAPLWKKRIERVRKSFLSNSAKNLWVLYQVFKDDTDEKKKAR
ARQYYHFSVLKEGKNLGFNLTKTREYFLDKFFPIFHSSAPDVKRKVDTFR
SKFYAILDFIIYEASVSVANSGQMGKVAPWKGAIDNALVKLREAPDEEAK
EKIYNVLAASIRNDSLFLRLKSACDKFGAEQNRPVFPNELRNNRDIRNVR
SEWLEATQDVDAAAFVQLIAFLCNFLEGKEINELVTALIKKFEGIQALID
LLRNLEGVDSIRFENEFALFNDDKGNMAGRIARQLRLLASVGKMKPDMTD
AKRVLYKSALEILGAPPDEVSDEWLAENILLDKSNNDYQKAKKTVNPFRN
YIAKNVITSRSFYYLVRYAKPTAVRKLMSNPKIVRYVLKRLPEKQVASYY
SAIWTQSESNSNEMVKLIEMIDRLTTEIAGFSFAVLKDKKDSIVSASRES
RAVNLEVERLKKLTTLYMSIAYIAVKSLVKVNARYFIAYSALERDLYFFN
EKYGEEFRLHFIPYELNGKTCQFEYLAILKYYLARDEETLKRKCEICEEI
KVGCEKHKKNANPPYEYDQEWIDKKKALNSERKACERRLHFSTHWAQYAT
KRDENMAKHPQKWYDILASHYDELLALQATGWLATQARNDAEHLNPVNEF
DVYIEDLRRYPEGTPKNKDYHIGSYFEIYHYIRQRAYLEEVLAKRKEYRD
SGSFTDEQLDKLQKILDDIRARGSYDKNLLKLEYLPFAYNLPRYKNLTTE
ALFDDDSVSGKKRVAEWREREKTREAEREQRRQR.

[0316] An exemplary direct repeat sequence of Cas13d (contig e-k87_11092736) (SEQ ID NO: 46) comprises or consists of the nucleic acid sequence:

Cas13d (contig e-k87_11092736) Direct Repeat Sequence):

(SEQ ID NO: 47)
GTGAGAAGTCTCCTTATGGGGAGATGCTAC.

[0317] Exemplary wild type Cas13d proteins of the disclosure may comprise or consist of the amino acid sequence:

Cas13d (160582958_gene49834):

(SEQ ID NO: 48)
MKNSVTFKLIQAQENKEAARKKAKDIAEQARIAKRNGVVKKEENRINRIQ
IEIQTQKKSNTQNAYHLKSLAKAAGVKSVFAIGNDLLMTGFGPGNDATIE
KRVFQNRAIETLSSPEQYSAEFQNKQFKIKGNIKVLNHSTQKMEEIQTEL
QDNYNRPHFDLLGCKNVLEQKYFGRTFSDNIHVQIAYNIMDIEKLLTPYI
NNIIYTLNELMRDNSKDDFFGCDSHFSVAYLYDELKAGYSDRLKTKPNLS
KNIDRIWNNFCNYMNSDSGNTEARLAYFGELFYKPKETGDAKSDYKTHLS
NNQKEEWELKSDKEVYNIFAILCDLRHFCTHGESITPSGKPFPYNLEKNL
FPEAKQVLNSLFEEKAESLGAEAFGKTAGKTDVSILLKVFEKEQASQKEQ
QALLKEYYDFKVQKTYKNMGFSIKKLREAIMEIPDAAKFKDDLYSSLRHK
LYGLFDFILVKHFLDTSDSENLQNNDIFRQLRACRCEEEKDQVYRSIAVK
VWEKVKKKELNMFKQVVVIPSLSKDELKQMEMTKNTELLSSIETISTQAS
LFSEMIFMMTYLLDGKEINLLCTSLIEKFENIASFNEVLKSPQIGYETKY
TEGYAFFKNADKTAKELRQVNNMARMTKPLGGVNTKCVMYNEAAKILGAK
PMSKAELESVFNLDNHDYTYSPSGKKIPNKNFRNFIINNVITSRRFLYLI
RYGNPEKIRKIAINPSIISFVLKQIPDEQIKRYYPPCIGKRTDDVTLMRD
ELGKMLQSVNFEQFSRVNNKQNAKQNPNGEKARLQACVRLYLTVPYLFIK
NMVNINARYVLAFHCLERDHALCFNSRKLNDDSYNEMANKFQMVRKAKKE
QYEKEYKCKKQETGTAHTKKIEKLNQQIAYIDKDIKNMHSYTCRNYRNLV
AHLNVVSKLQNYVSELPNDYQITSYFSFYHYCMQLGLMEKVSSKNIPLVE
SLKNEANDAQSYSAKKTLEYFDLIEKNRTYCKDFLKALNAPFSYNLPRFK
NLSIEALFDKNIVYEQADLKKE.

[0318] An exemplary direct repeat sequence of Cas13d (160582958_gene49834) (SEQ ID NO: 48) comprises or consists of the nucleic acid sequence:

Cas13d (160582958_gene49834) Direct Repeat Sequence:

(SEQ ID NO: 49)
GAACTACACCCCTCTGTTCTTGTAGGGGTCTAACAC.

[0319] Exemplary wild type Cas13d proteins of the disclosure may comprise or consist of the amino acid sequence:

Cas13d (contig tpg|DJXD01000002.1|; uncultivated Ruminococcus assembly, UBA7013, from sheep gut metagenome):

(SEQ ID NO: 50)
MKKQKSKKTVSKTSGLKEALSVQGTVIMTSFGKGNMANLSYKIPSSQKPQ
NLNSSAGLKNVEVSGKKIKFQGRHPKIATTDNPLFKPQPGMDLLCLKDKL
EMHYFGKTFDDNIHIQLIYQILDIEKILAVHVNNIVFTLDNVLHPQKEEL
TEDFIGAGGWRINLDYQTLRGQTNKYDRFKNYIKRKELLYFGEAFYHENE
RRYEEDIFAILTLLSALRQFCFHSDLSSDESDHVNSFWLYQLEDQLSDEF
KETLSILWEEVTERIDSEFLKTNTVNLHILCHVFPKESKETIVRAYYEFL
IKKSFKNMGFSIKKLREIMLEQSDLKSFKEDKYNSVRAKLYKLFDFIITY
YYDHHAFEKEALVSSLRSSLTEENKEEIYIKTARTLASALGADFKKAAAD
VNAKNIRDYQKKANDYRISFEDIKIGNTGIGYFSELIYMLTLLLDGKEIN
DLLTTLINKFDNIISFIDILKKLNLEFKFKPEYADFFNMTNCRYTLEELR
VINSIARMQKPSADARKIMYRDALRILGMDNRPDEEIDRELERTMPVGAD
GKFIKGKQGFRNFIASNVIESSRFHYLVRYNNPHKTRTLVKNPNVVKFVL
EGIPETQIKRYFDVCKGQEIPPTSDKSAQIDVLARIISSVDYKIFEDVPQ
SAKINKDDPSRNFSDALKKQRYQAIVSLYLTVMYLITKNLVYVNSRYVIA
FHCLERDAFLHGVTLPKMNKKIVYSQLTTHLLTDKNYTTYGHLKNQKGHR
KWYVLVKNNLQNSDITAVSSFRNIVAHISVVRNSNEYISGIGELHSYFEL
YHYLVQSMIAKNNWYDTSHQPKTAEYLNNLKKHHTYCKDFVKAYCIPFGY
VVPRYKNLTINELFDRNNPNPEPKEEV.

[0320] An exemplary direct repeat sequence of Cas13d (contig tpg|DJXD01000002.1|; uncultivated Ruminococcus assembly, UBA7013, from sheep gut metagenome) (SEQ ID NO: 50) comprises or consists of the nucleic acid sequence:

[0321] Cas13d (contig tpg|DJXD01000002.1|; uncultivated Ruminococcus assembly, UBA7013, from sheep gut metagenome):

(SEQ ID NO: 51)

CAACTACAACCCCGTAAAAATACGGGGTTCTGAAAC.

[0322] In some embodiments of the disclosure, a CjeCas9-endonuclease fusions and gRNA molecule may comprise or consist of the nucleic acid sequence of:

E43-CjeCas9 and sgRNA plasmid
(U6: N's = sgRNA spacer, E43, CjeCas9)
(SEQ ID NO: 202)
gtttattacagggacagcagagatccagtttggttaattaaggtaccgag
ggcctatttcccatgattccttcatatttgcatatacgatacaaggctgt
tagagagataattagaattaatttgactgtaaacacaaagatattagtac
aaaatacgtgacgtagaaagtaataatttcttgggtagtttgcagtttta
aaattatgttttaaaatggactatcatatgcttaccgtaacttgaaagta
tttcgatttcttggctttatatatcttGTGGAAAGGACGAAACACCNNNN
NNNNNNNNNNNNNNNGTTTTAGTCCCTGAAGGGACTAAAATAAAGAGTTT
GCGGGACTCTGCGGGGTTACAATCCCCTAAAACCGCTTTTTTTCCTGCAG
CCCGGGGGATCCACTAGTTCTAGAGCGGCCGCCACCGCGGTGGAGCTCCA
GCTTTTGTTCCCTTTAGTGAGGGTTAATTGCGCGAATTCGCTAGCTAGGT
CTTGAAAGGAGTGGGAATTGGCTCCGGTGCCCGTCAGTGGGCAGAGCGCA
CATCGCCCACAGTCCCCGAGAAGTTGGGGGGAGGGGTCGGCAATTGATCC
GGTGCCTAGAGAAGGTGGCGCGGGGTAAACTGGGAAAGTGATGTCGTGTA
CTGGCTCCGCCTTTTTCCCGAGGGTGGGGGAGAACCGTATATAAGTGCAG
TAGTCGCCGTGAACGTTCTTTTTCGCAACGGGTTTGCCGCCAGAACACAG
GACCGGTTCTAGAGCGCTATTTAGAACCatgTGTTCTCCCCAAGAATCTG
GCATGACCGCTCTTTCAGCGAGGATGTTGACGCGAAGCAGATCCCTGGGA
CCTGGGGCCGGGCCACGAGGGTGTCGGGAAGAACCAGGACCGTTGCGACG
GAGGGAAGCAGCAGCGGAAGCTCGGAAATCCCATTCTCCGGTTAAACGAC
CCCGCAAGGCACAACGGCTCAGGGTTGCTTACGAGGGGAGCGATTCCGAA
AAGGGTGAAGGAGCAGAGCCCTTGAAGGTTCCAGTATGGGAACCCCAGGA
TTGGCAGCAGCAGCTTGTAAACATCCGAGCAATGAGGAACAAAAAAGATG
CACCTGTTGATCACCTCGGAACCGAACATTGTTATGATTCTAGTGCGCCG
CCAAAAGTCCGCCGGTATCAGGTTCTGTTGAGTTTGATGCTGAGTAGTCA
GACTAAGGACCAGGTTACGGCCGGAGCAATGCAACGGCTTCGGGCACGGG
GACTCACGGTCGATAGCATTTTGCAGACCGATGACGCAACATTGGGTAAA
CTCATATATCCAGTTGGCTTCTGGCGGAGCAAAGTGAAGTACATCAAGCA
GACCTCAGCCATTCTCCAACAACATTACGGAGGTGATATACCCGCAAGCG
TAGCTGAACTGGTAGCACTGCCGGGCGTCGGTCCCAAAATGGCACATCTG
GCTATGGCGGTTGCTTGGGGAACGGTGTCTGGTATCGCAGTTGATACGCA
TGTCCACCGCATCGCCAATCGGCTGAGGTGGACTAAAAAAGCCACTAAGT
CTCCTGAAGAAACACGGGCTGCTCTGGAAGAGTGGCTTCCACGAGAGCTG
TGGCATGAAATCAATGGATTGCTGGTTGGTTTCGGGCAGCAGACATGCTT
GCCCGTGCACCCCCGGTGTCATGCTTGCTTGAACCAGGCTTTGTGCCCAG
CTGCCCAGGGCCTGAGTGGAAGTGAGACACCGGGAACATCTGAGTCTGCG
ACCCCGGAGAGCacaaacGCGCGAATCCTGGCCTTCGcgATTGGCATTAG
CAGCATCGGCTGGGCATTCTCTGAAAACGACGAACTGAAGGATTGCGGCG
TGCGAATTTTCACTAAGGTCGAAAATCCCAAAACTGGTGAATCACTCGCT
CTCCCTAGACGACTGGCACGCTCCGCACGAAAGAGGCTTGCCCGCCGCAA
GGCACGCTTGAACCATCTTAAACACCTTATTGCAAATGAGTTTAAACTGA
ATTATGAGGACTACCAATCCTTTGACGAGTCTCTTGCTAAAGCCTACAAA
GGGAGCCTTATATCCCCGTATGAGCTCCGGTTCAGAGCACTCAACGAACT
GCTGTCCAAACAGGATTTTGCTCGCGTGATTCTCCACATAGCGAAGAGGC
GAGGATACGATGACATTAAAAACAGTGATGATAAGGAAAAAGGGGCCATA
CTCAAAGCGATTAAGCAAAATGAAGAGAAGCTCGCTAACTATCAATCAGT
AGGGGAGTATCTCTATAAAGAGTACTTCCAGAAGTTCAAAGAAAATAGCA
AGGAATTTACTAATGTCCGGAATAAAAAGGAGTCTTACGAAAGATGTATT
GCGCAATCTTTCCTCAAGGACGAGCTCAAATTGATTTTCAAGAAACAAAG
GGAATTTGGGTTCAGCTTCTCAAAAAAATTTGAGGAAGAGGTTCTGAGCG
TTGCCTTTTACAAACGCGCCCTTAAGGACTTCTCACATCTCGTAGGGAAT
TGTAGTTTCTTCACCGATGAAAAACGGGCGCCAAAAAATAGCCCTTTGGC
TTTTATGTTTGTCGCTCTGACTCGCATCATTAATCTGCTCAACAACCTTA
AAAACACGGAAGGGATTCTGTACACAAAGGATGATCTGAACGCTCTGCTT
AACGAAGTTTTGAAGAACGGGACTTTGACCTACAAACAAACCAAAAAGCT
TCTTGGTCTCAGTGATGACTACGAATTCAAGGGAGAAAAAGGGACATATT
TCATCGAATTCAAGAAGTATAAGGAGTTCATCAAAGCCTTGGGCGAGCAC
AACTTGTCTCAAGATGATCTCAACGAAATTGCTAAGGATATCACTCTGAT
TAAAGACGAGATCAAGCTCAAAAAGGCGTTGGCGAAGTATGACCTTAACC
AAAACCAAATAGATAGCCTCAGCAAGTTGGAATTTAAAGATCACTTGAAT
ATAAGTTTCAAGGCCCTTAAGTTGGTCACCCCCTTGATGCTTGAAGGAAA
GAAATATGATGAGGCATGTAATGAGCTGAATCTCAAGGTTGCTATTAACG
AAGACAAAAAAGATTTCCTCCCAGCTTTCAATGAGACTTACTATAAGGAC
GAGGTTACCAATCCTGTGGTGCTCCGAGCCATCAAAGAGTATCGAAAGGT
CCTGAATGCTTTGCTCAAAAAATACGGTAAGGTACACAAAATAAATATTG
AGCTCGCAAGGGAGGTCGGTAAGAACCACTCCCAGCGCGCCAAAATAGAA
AAGGAACAGAATGAAAATTACAAAGCGAAAAAGGACGCCGAGCTCGAGTG
CGAAAAGCTGGGCCTGAAAATAAACAGCAAGAACATTCTCAAACTCCGCC
TCTTCAAAGAACAAAAAGAATTTTGTGCTTATAGTGGTGAGAAAATAAAA
ATCTCCGATCTTCAAGACGAGAAGATGCTCGAAATAGACgcgATATATCC
ATATAGCAGGTCTTTTGACGATTCTTACATGAATAAAGTGCTTGTTTTCA
CTAAGCAGAATCAGGAAAAGTTGAATCAGACCCCCTTTGAGGCCTTTGGC
AACGACTCAGCAAAGTGGCAGAAGATCGAGGTCTTGGCTAAGAATCTTCC
TACTAAGAAACAGAAAAGGATATTGGATAAGAACTATAAAGACAAAGAAC
AAAAGAACTTTAAAGACCGCAACCTCAATGACACCAGATACATAGCAAGA
TTGGTTCTGAACTACACAAAAGATTATTTGGACTTCTTGCCGCTGTCTGA
TGATGAGAACACGAAACTCAACGACACGCAAAAGGGGTCTAAAGTCCACG
TCGAAGCTAAATCTGGGATGCTCACCTCAGCATTGAGGCATACGTGGGGA
TTCTCAGCAAAGGACCGAAACAATCACCTGCACCATGCCATTGACGCAGT
TATCATAGCGTATGCCAATAATTCAATAGTAAAAGCGTTTAGCGACTTCA
AGAAGGAACAAGAGTCCAACAGCGCCGAGCTCTACGCAAAAAAGATTAGT
GAACTCGACTACAAAAACAAAAGAAAATTCTTTGAGCCGTTCAGCGGATT
TCGACAGAAGGTATTGGATAAAATAGATGAAATTTTCGTGAGCAAACCCG
AAAGGAAAAAGCCCTCAGGCGCCTTGCACGAAGAGACTTTCAGGAAGGAA
GAGGAATTCTACCAAAGCTACGGCGGAAAAGAGGGAGTTTTGAAGGCTCT
CGAACTTGGAAAGATTAGGAAGGTGAACGGCAAGATAGTGAAAAACGGCG
ATATGTTCCGGGTTGATATCTTCAAACATAAAAAAACGAATAAATTTTAT
GCTGTGCCTATATACACTATGGACTTCGCACTTAAGGTCCTGCCGAATAA
GGCGGTAGCCCGATCTAAAAAAGGCGAAATTAAGGACTGGATTTTGATGG
ATGAAAATTACGAGTTCTGCTTTTCTCTCTACAAGGATTCCCTTATATTG
ATACAGACGAAAGATATGCAGGAACCGGAATTCGTGTATTACAACGCTTT
TACTTCCTCTACGGTATCTTTGATTGTCTCCAAACATGACAACAAATTCG
AAACACTCAGTAAAAACCAAAAGATTCTCTTTAAAAATGCGAACGAGAAA
GAAGTAATTGCAAAATCAATTGGCATCCAAAATTTGAAAGTTTTTGAAAA
ATATATAGTATCTGCCCTCGGAGAGGTTACTAAAGCGGAATTTAGACAGC
GAGAGGACTTCAAAAAATCAGGTCCACCCAAGAAAAAACGCAAGGTGGAA
GATCCGAAGAAAAAGCGAAAAGTGGATGTGtaaCGTTTTCCGGGACGCCG
GCTGGATGATCCTCCAGCGCGGGGATCTCATGCTGGAGTTCTTCGCCCAC
CCCAACTTGTTTATTGCAGCTTATAATGGTTACAAATAAAGCAATAGCAT
CACAAATTTCACAAATAAAGCATTTTTTTCACTGCATTCTAGTTGTGGTT
TGTCCAAACTCATCAATGTATCTTATCATGTCTGTATACCG.

[0323] In some embodiments of the disclosure, a CjeCas9-endonuclease fusions and gRNA molecule may comprise or consist of the nucleic acid sequence of:

E67-CjeCas9 and sgRNA plasmid
(U6: N's = sgRNA spacer, E67, CjeCas9)
(SEQ ID NO: 203)
gtttattacagggacagcagagatccagtttggttaattaaggtaccgag
ggcctatttcccatgattccttcatatttgcatatacgatacaaggctgt
tagagagataattagaattaatttgactgtaaacacaaagatattagtac
aaaatacgtgacgtagaaagtaataatttcttgggtagtttgcagtttta
aaattatgttttaaaatggactatcatatgcttaccgtaacttgaaagta
tttcgatttcttggctttatatatcttGTGGAAAGGACGAAACACCNNNN
NNNNNNNNNNNNNNNGTTTTAGTCCCTGAAGGGACTAAAATAAAGAGTTT
GCGGGACTCTGCGGGGTTACAATCCCCTAAAACCGCTTTTTTTCCTGCAG
CCCGGGGGATCCACTAGTTCTAGAGCGGCCGCCACCGCGGTGGAGCTCCA
GCTTTTGTTCCCTTTAGTGAGGGTTAATTGCGCGAATTCGCTAGCTAGGT
CTTGAAAGGAGTGGGAATTGGCTCCGGTGCCCGTCAGTGGGCAGAGCGCA
CATCGCCCACAGTCCCCGAGAAGTTGGGGGGAGGGGTCGGCAATTGATCC
GGTGCCTAGAGAAGGTGGCGCGGGGTAAACTGGGAAAGTGATGTCGTGTA
CTGGCTCCGCCTTTTTCCCGAGGGTGGGGGAGAACCGTATATAAGTGCAG
TAGTCGCCGTGAACGTTCTTTTTCGCAACGGGTTTGCCGCCAGAACACAG
GACCGGTTCTAGAGCGCTATTTAGAACCatgCAGGAGGTAATAGCGGGGC
TTGAGCGATTTACCTTTGCCTTCGAAAAAGACGTAGAGATGCAGAAGGGA
ACCGGCCTGCTCCCATTTCAAGGTATGGACAAATCAGCATCTGCCGTGTG
CAATTTTTTCACCAAGGGTCTGTGTGAAAAGGGGAAGCTCTGTCCATTTC
GCCATGATCGCGGAGAGAAGATGGTGGTGTGTAAGCACTGGCTGAGAGGG
CTTTGCAAAAAAGGCGACCACTGCAAATTTCTTCACCAATATGACCTGAC
TCGAATGCCTGAGTGTTATTTTTACAGTAAGTTCGGTGACTGTAGCAACA
AAGAATGCAGCTTCTTGCATGTCAAACCAGCATTCAAGTCACAGGATTGC
CCGTGGTACGATCAGGGTTTTTGCAAGGACGGTCCCCTCTGCAAATATCG
ACACGTACCCAGAATTATGTGCCTTAATTACCTGGTCGGCTTCTGTCCTG
AAGGGCCAAAATGTCAGTTTGCTCAAAAAATTCGCGAGTTCAAATTGCTC
CCTGGGTCTAAAATTTGGGAACCCCAGGATTGGCAGCAGCAGCTTGTAAA
CATCCGAGCAATGAGGAACAAAAAAGATGCACCTGTTGATCACCTCGGAA
CCGAACATTGTTATGATTCTAGTGCGCCGCCAAAAGTCCGCCGGTATCAG
GTTCTGTTGAGTTTGATGCTGAGTAGTCAGACTAAGGACCAGGTTACGGC
CGGAGCAATGCAACGGCTTCGGGCACGGGGACTCACGGTCGATAGCATTT
TGCAGACCGATGACGCAACATTGGGTAAACTCATATATCCAGTTGGCTTC
TGGCGGAGCAAAGTGAAGTACATCAAGCAGACCTCAGCCATTCTCCAACA
ACATTACGGAGGTGATATACCCGCAAGCGTAGCTGAACTGGTAGCACTGC
CGGGCGTCGGTCCCAAAATGGCACATCTGGCTATGGCGGTTGCTTGGGGA
ACGGTGTCTGGTATCGCAGTTGATACGCATGTCCACCGCATCGCCAATCG
GCTGAGGTGGACTAAAAAAGCCACTAAGTCTCCTGAAGAAACACGGGCTG
CTCTGGAAGAGTGGCTTCCACGAGAGCTGTGGCATGAAATCAATGGATTG
CTGGTTGGTTTCGGGCAGCAGACATGCTTGCCCGTGCACCCCCGGTGTCA
TGCTTGCTTGAACCAGGCTTTGTGCCCAGCTGCCCAGGGCCTGAGTGGAA
GTGAGACACCGGGAACATCTGAGTCTGCGACCCCGGAGAGCacaaacGCG
CGAATCCTGGCCTTCGcgATTGGCATTAGCAGCATCGGCTGGGCATTCTC
TGAAAACGACGAACTGAAGGATTGCGGCGTGCGAATTTTCACTAAGGTCG
AAAATCCCAAAACTGGTGAATCACTCGCTCTCCCTAGACGACTGGCACGC
TCCGCACGAAAGAGGCTTGCCCGCCGCAAGGCACGCTTGAACCATCTTAA
ACACCTTATTGCAAATGAGTTTAAACTGAATTATGAGGACTACCAATCCT
TTGACGAGTCTCTTGCTAAAGCCTACAAAGGGAGCCTTATATCCCCGTAT
GAGCTCCGGTTCAGAGCACTCAACGAACTGCTGTCCAAACAGGATTTTGC
TCGCGTGATTCTCCACATAGCGAAGAGGCGAGGATACGATGACATTAAAA
ACAGTGATGATAAGGAAAAAGGGGCCATACTCAAAGCGATTAAGCAAAAT
GAAGAGAAGCTCGCTAACTATCAATCAGTAGGGGAGTATCTCTATAAAGA
GTACTTCCAGAAGTTCAAAGAAAATAGCAAGGAATTTACTAATGTCCGGA
ATAAAAAGGAGTCTTACGAAAGATGTATTGCGCAATCTTTCCTCAAGGAC
GAGCTCAAATTGATTTTCAAGAAACAAAGGGAATTTGGGTTCAGCTTCTC
AAAAAAATTTGAGGAAGAGGTTCTGAGCGTTGCCTTTTACAAACGCGCCC
TTAAGGACTTCTCACATCTCGTAGGGAATTGTAGTTTCTTCACCGATGAA
AAACGGGCGCCAAAAAATAGCCCTTTGGCTTTTATGTTTGTCGCTCTGAC
TCGCATCATTAATCTGCTCAACAACCTTAAAAACACGGAAGGGATTCTGT
ACACAAAGGATGATCTGAACGCTCTGCTTAACGAAGTTTTGAAGAACGGG
ACTTTGACCTACAAACAAACCAAAAAGCTTCTTGGTCTCAGTGATGACTA
CGAATTCAAGGGAGAAAAAGGGACATATTTCATCGAATTCAAGAAGTATA
AGGAGTTCATCAAAGCCTTGGGCGAGCACAACTTGTCTCAAGATGATCTC
AACGAAATTGCTAAGGATATCACTCTGATTAAAGACGAGATCAAGCTCAA
AAAGGCGTTGGCGAAGTATGACCTTAACCAAAACCAAATAGATAGCCTCA
GCAAGTTGGAATTTAAAGATCACTTGAATATAAGTTTCAAGGCCCTTAAG
TTGGTCACCCCCTTGATGCTTGAAGGAAAGAAATATGATGAGGCATGTAA
TGAGCTGAATCTCAAGGTTGCTATTAACGAAGACAAAAAAGATTTCCTCC
CAGCTTTCAATGAGACTTACTATAAGGACGAGGTTACCAATCCTGTGGTG
CTCCGAGCCATCAAAGAGTATCGAAAGGTCCTGAATGCTTTGCTCAAAAA
ATACGGTAAGGTACACAAAATAAATATTGAGCTCGCAAGGGAGGTCGGTA
AGAACCACTCCCAGCGCGCCAAAATAGAAAAGGAACAGAATGAAAATTAC
AAAGCGAAAAAGGACGCCGAGCTCGAGTGCGAAAAGCTGGGCCTGAAAAT
AAACAGCAAGAACATTCTCAAACTCCGCCTCTTCAAAGAACAAAAAGAAT
TTTGTGCTTATAGTGGTGAGAAAATAAAAATCTCCGATCTTCAAGACGAG
AAGATGCTCGAAATAGACgcgATATATCCATATAGCAGGTCTTTTGACGA
TTCTTACATGAATAAAGTGCTTGTTTTCACTAAGCAGAATCAGGAAAAGT
TGAATCAGACCCCCTTTGAGGCCTTTGGCAACGACTCAGCAAAGTGGCAG
AAGATCGAGGTCTTGGCTAAGAATCTTCCTACTAAGAAACAGAAAAGGAT
ATTGGATAAGAACTATAAAGACAAAGAACAAAAGAACTTTAAAGACCGCA
ACCTCAATGACACCAGATACATAGCAAGATTGGTTCTGAACTACACAAAA
GATTATTTGGACTTCTTGCCGCTGTCTGATGATGAGAACACGAAACTCAA
CGACACGCAAAAGGGGTCTAAAGTCCACGTCGAAGCTAAATCTGGGATGC
TCACCTCAGCATTGAGGCATACGTGGGGATTCTCAGCAAAGGACCGAAAC
AATCACCTGCACCATGCCATTGACGCAGTTATCATAGCGTATGCCAATAA
TTCAATAGTAAAAGCGTTTAGCGACTTCAAGAAGGAACAAGAGTCCAACA
GCGCCGAGCTCTACGCAAAAAAGATTAGTGAACTCGACTACAAAAACAAA
AGAAAATTCTTTGAGCCGTTCAGCGGATTTCGACAGAAGGTATTGGATAA
AATAGATGAAATTTTCGTGAGCAAACCCGAAAGGAAAAAGCCCTCAGGCG
CCTTGCACGAAGAGACTTTCAGGAAGGAAGAGGAATTCTACCAAAGCTAC
GGCGGAAAAGAGGGAGTTTTGAAGGCTCTCGAACTTGGAAAGATTAGGAA
GGTGAACGGCAAGATAGTGAAAAACGGCGATATGTTCCGGGTTGATATCT
TCAAACATAAAAAAACGAATAAATTTTATGCTGTGCCTATATACACTATG
GACTTCGCACTTAAGGTCCTGCCGAATAAGGCGGTAGCCCGATCTAAAAA
AGGCGAAATTAAGGACTGGATTTTGATGGATGAAAATTACGAGTTCTGCT
TTTCTCTCTACAAGGATTCCCTTATATTGATACAGACGAAAGATATGCAG
GAACCGGAATTCGTGTATTACAACGCTTTTACTTCCTCTACGGTATCTTT
GATTGTCTCCAAACATGACAACAAATTCGAAACACTCAGTAAAAACCAAA
AGATTCTCTTTAAAAATGCGAACGAGAAAGAAGTAATTGCAAAATCAATT
GGCATCCAAAATTTGAAAGTTTTTGAAAAATATATAGTATCTGCCCTCGG
AGAGGTTACTAAAGCGGAATTTAGACAGCGAGAGGACTTCAAAAAATCAG
GTCCACCCAAGAAAAAACGCAAGGTGGAAGATCCGAAGAAAAAGCGAAAA
GTGGATGTGtaaCGTTTTCCGGGACGCCGGCTGGATGATCCTCCAGCGCG
GGGATCTCATGCTGGAGTTCTTCGCCCACCCCAACTTGTTTATTGCAGCT
TATAATGGTTACAAATAAAGCAATAGCATCACAAATTTCACAAATAAAGC
ATTTTTTTCACTGCATTCTAGTTGTGGTTTGTCCAAACTCATCAATGTAT
CTTATCATGTCTGTATACCG.

gRNA Target Sequences

[0324] In some embodiments of the compositions of the disclosure, a target sequence of an RNA molecule comprises a sequence motif corresponding to the first RNA binding protein and/or the second RNA binding protein.

[0325] In some embodiments of the compositions and methods of the disclosure, the sequence motif is a signature of a disease or disorder.

[0326] A sequence motif of the disclosure may be isolated or derived from a sequence of foreign or exogenous sequence found in a genomic sequence, and therefore translated into an mRNA molecule of the disclosure or a sequence of foreign or exogenous sequence found in an RNA sequence of the disclosure.

[0327] A sequence motif of the disclosure may comprise or consist of a mutation in an endogenous sequence that causes a disease or disorder. The mutation may comprise or consist of a sequence substitution, inversion, deletion, insertion, transposition, or any combination thereof.

[0328] A sequence motif of the disclosure may comprise or consist of a repeated sequence. In some embodiments, the repeated sequence may be associated with a microsatellite instability (MSI). MSI at one or more loci results from impaired DNA mismatch repair mechanisms of a cell of the disclosure. A hypervariable sequence of DNA may be transcribed into an mRNA of the disclosure comprising a target sequence comprising or consisting of the hypervariable sequence.

[0329] A sequence motif of the disclosure may comprise or consist of a biomarker. The biomarker may indicate a risk of developing a disease or disorder. The biomarker may indicate a healthy gene (low or no determinable risk of developing a disease or disorder. The biomarker may indicate an edited gene. Exemplary biomarkers include, but are not limited to, single nucleotide polymorphisms (SNPs), sequence variations or mutations, epigenetic marks, splice acceptor sites, exogenous sequences, heterologous sequences, and any combination thereof.

[0330] A sequence motif of the disclosure may comprise or consist of a secondary, tertiary or quaternary structure. The secondary, tertiary or quaternary structure may be endogenous or naturally occurring. The secondary, tertiary or quaternary structure may be induced or non-naturally occurring. The secondary, tertiary or quaternary structure may be encoded by an endogenous, exogenous, or heterologous sequence.

[0331] In some embodiments of the compositions and methods of the disclosure, a target sequence of an RNA molecule comprises or consists of between 2 and 100 nucleotides or nucleic acid bases, inclusive of the endpoints. In some embodiments, the target sequence of an RNA molecule comprises or consists of between 2 and 50 nucleotides or nucleic acid bases, inclusive of the endpoints. In some embodiments, the target sequence of an RNA molecule comprises or consists of between 2 and 20 nucleotides or nucleic acid bases, inclusive of the endpoints.

[0332] In some embodiments of the compositions and methods of the disclosure, a target sequence of an RNA molecule is continuous. In some embodiments, the target sequence of an RNA molecule is discontinuous. For example, the target sequence of an RNA molecule may comprise or consist of one or more nucleotides or nucleic acid bases that are not contiguous because one or more intermittent nucleotides are positioned in between the nucleotides of the target sequence.

[0333] In some embodiments of the compositions and methods of the disclosure, a target sequence of an RNA molecule is naturally occurring. In some embodiments, the target sequence of an RNA molecule is non-naturally occurring. Exemplary non-naturally occurring target sequences may comprise or consist of sequence variations or mutations, chimeric sequences, exogenous sequences, heterologous sequences, chimeric sequences, recombinant sequences, sequences comprising a modified or synthetic nucleotide or any combination thereof.

[0334] In some embodiments of the compositions and methods of the disclosure, a target sequence of an RNA molecule binds to a guide RNA of the disclosure.

[0335] In some embodiments of the compositions and methods of the disclosure, a target sequence of an RNA molecule binds to a first RNA binding protein of the disclosure.

[0336] In some embodiments of the compositions and methods of the disclosure, a target sequence of an RNA molecule binds to a second RNA binding protein of the disclosure.

### RNA Molecules

[0337] In some embodiments of the compositions and methods of the disclosure, an RNA molecule of the disclosure comprises a target sequence. In some embodiments, the RNA molecule of the disclosure comprises at least one target sequence. In some embodiments, the RNA molecule of the disclosure comprises one or more target sequence(s). In some embodiments, the RNA molecule of the disclosure comprises two or more target sequences.

[0338] In some embodiments of the compositions and methods of the disclosure, an RNA molecule of the disclosure is a naturally occurring RNA molecule. In some embodiments, the RNA molecule of the disclosure is a non-naturally occurring molecule. Exemplary non-naturally occurring RNA molecules may comprise or consist of sequence variations or mutations, chimeric sequences, exogenous sequences, heterologous sequences, chimeric sequences, recombinant sequences, sequences comprising a modified or synthetic nucleotide or any combination thereof.

[0339] In some embodiments of the compositions and methods of the disclosure, an RNA molecule of the disclosure comprises or consists of a sequence isolated or derived from a virus.

[0340] In some embodiments of the compositions and methods of the disclosure, an RNA molecule of the disclosure comprises or consists of a sequence isolated or derived from a prokaryotic organism. In some embodiments, an RNA molecule of the disclosure comprises or consists of a sequence isolated or derived from a species or strain of archaea or a species or strain of bacteria.

[0341] In some embodiments of the compositions and methods of the disclosure, the RNA molecule of the disclosure comprises or consists of a sequence isolated or derived from a eukaryotic organism. In some embodiments, an RNA molecule of the disclosure comprises or consists of a sequence isolated or derived from a species of protozoa, parasite, protist, algae, fungi, yeast, amoeba, worm, microorganism, invertebrate, vertebrate, insect, rodent, mouse, rat, mammal, or a primate. In some embodiments, an RNA molecule of the disclosure comprises or consists of a sequence isolated or derived from a human.

[0342] In some embodiments of the compositions and methods of the disclosure, the RNA molecule of the disclosure comprises or consists of a sequence derived from a coding sequence from a genome of an organism or a virus. In some embodiments, the RNA molecule of the disclosure comprises or consists of a primary RNA transcript, a precursor messenger RNA (pre-mRNA) or messenger RNA (mRNA). In some embodiments, the RNA molecule of the disclosure comprises or consists of a gene product that has not been processed (e.g. a transcript). In some embodiments, the RNA molecule of the disclosure comprises or consists of a gene product that has been subject to post-transcriptional processing (e.g. a transcript comprising a 5′cap and a 3′ polyadenylation signal). In some embodiments, the RNA molecule of the disclosure comprises or consists of a gene product that has been subject to alternative splicing (e.g. a splice variant). In some embodiments, the RNA molecule of the disclosure comprises or consists of a gene product that has been subject to removal of non-coding and/or intronic sequences (e.g. a messenger RNA (mRNA)).

[0343] In some embodiments of the compositions and methods of the disclosure, the RNA molecule of the disclosure comprises or consists of a sequence derived from a non-coding sequence (e.g. a non-coding RNA (ncRNA)). In some embodiments, the RNA molecule of the disclosure comprises or consists of a ribosomal RNA. In some embodiments, the RNA molecule of the disclosure comprises or consists of a small ncRNA molecule. Exemplary small RNA molecules of the disclosure include, but are not limited to, microRNAs (miRNAs), small interfering (siRNAs), piwi-interacting RNAs (piRNAs), small nucleolar RNAs (snoRNAs), small nuclear RNAs (snRNAs), extracellular or exosomal RNAs (exRNAs), and small Cajal body-specific RNAs (scaRNAs). In some embodiments, the RNA molecule of the disclosure comprises or consists of a long ncRNA molecule. Exemplary long RNA molecules of the disclosure include, but are not limited to, X-inactive specific transcript (Xist) and HOX transcript antisense RNA (HOTAIR).

[0344] In some embodiments of the compositions and methods of the disclosure, the RNA molecule of the disclosure contacted by a composition of the disclosure in an intracellular space. In some embodiments, the RNA molecule of the disclosure contacted by a composition of the disclosure in a cytosolic space. In some embodiments, the RNA molecule of the disclosure contacted by a composition of the disclosure in a nucleus. In some embodiments, the RNA molecule of the disclosure contacted by a composition of the disclosure in a vesicle, membrane-bound compartment of a cell, or an organelle.

[0345] In some embodiments of the compositions and methods of the disclosure, the RNA molecule of the disclosure contacted by a composition of the disclosure in an extracellular space. In some embodiments, the RNA molecule of the disclosure contacted by a composition of the disclosure in an exosome. In some embodiments, the RNA molecule of the disclosure contacted by a composition of the disclosure in a liposome, a polymersome, a micelle or a nanoparticle. In some embodiments, the RNA molecule of the disclosure contacted by a composition of the disclosure in an extracellular matrix. In some embodiments, the RNA molecule of the disclosure contacted by a composition of the disclosure in a droplet. In some embodiments, the RNA molecule of the disclosure contacted by a composition of the disclosure in a microfluidic droplet.

[0346] In some embodiments of the compositions and methods of the disclosure, a RNA molecule of the disclosure comprises or consists of a single-stranded sequence. In some embodiments, the RNA molecule of the disclosure comprises or consists of a double-stranded sequence. In some embodiments, the double-stranded sequence comprises two RNA molecules. In some embodiments, the double-stranded sequence comprises one RNA molecule and one DNA molecule. In some embodiments, including those wherein the double-stranded sequence comprises one RNA molecule and one DNA molecule, compositions of the disclosure selectively bind and, optionally, selectively cut the RNA molecule.

### Fusion Proteins

[0347] In some embodiments of the compositions and methods of the disclosure, the composition comprises a sequence encoding a target RNA-binding fusion protein comprising (a) a sequence encoding a first RNA-binding polypeptide or portion thereof; and (b) a sequence encoding a second RNA-binding polypeptide, wherein the first RNA-biding polypeptide binds a target RNA, and wherein the second RNA-binding polypeptide comprises RNA-nuclease activity.

[0348] In some embodiments, a target RNA-binding fusion protein is an RNA-guided target RNA-binding fusion protein. RNA-guided target RNA-binding fusion proteins comprise at least one RNA-binding polypeptide which corresponds to a gRNA which guides the RNA-binding polypeptide to target RNA. RNA-guided target RNA-binding fusion proteins include without limitation, RNA-binding polypeptides which are CRISPR/Cas-based RNA-binding polypeptides or portions thereof.

[0349] In some embodiments, a target RNA-binding fusion protein is not an RNA-guided target RNA-binding fusion protein and as such comprises at least one RNA-binding polypeptide which is capable of binding a target RNA without a corresponding gRNA sequence. Such non-guided RNA-binding polypeptides include, without limitation, at least one RNA-binding protein or RNA-binding portion thereof which is a PUF (Pumilio and FBF homology family). This type RNA-binding polypeptide can be used in place of a gRNA-guided RNA binding protein such as CRISPR/Cas. The unique RNA recognition mode of PUF proteins (named for Drosophila Pumilio and C. elegans fem-3 binding factor) that are involved in mediating mRNA stability and translation are well known in the art. The PUF domain of human Pumilio1, also known in the art, binds tightly to cognate RNA sequences and its specificity can be modified. It contains eight PUF repeats that recognize eight consecutive RNA bases with each repeat recognizing a single base. Since two amino acid side chains in each repeat recognize the Watson-Crick edge of the corresponding base and determine the specificity of that repeat, a PUF domain can be designed to specifically bind most 8-nt RNA. Wang et al., Nat Methods. 2009; 6(11): 825-830. See also WO2012/068627 which is incorporated by reference herein in its entirety.

[0350] In some embodiments of the non-guided RNA-binding fusion proteins of the disclosure, the fusion protein comprises at least one RNA-binding protein or RNA-binding portion thereof which is a PUMBY (Pumilio-based assembly) protein. RNA-binding protein PumHD (Pumilio homology domain, a member of the PUF family), which has been widely used in native and modified form for targeting RNA, has been engineered to yield a set of four canonical protein modules, each of which targets one RNA base. These modules (i.e., Pumby, for Pumilio-based assembly) can be concatenated in chains of varying composition and length, to bind desired target RNAs. The specificity of such Pumby-RNA interactions is high, with undetectable binding of a Pumby chain to RNA sequences that bear three or more mismatches from the target sequence. Katarzyna et al., PNAS, 2016; 113(19): E2579-E2588. See also US 2016/0238593 which is incorporated by reference herein in its entirety.

[0351] In some embodiments of the compositions of the disclosure, at least one of the RNA-binding proteins or RNA-binding portions thereof is a PPR protein. PPR proteins (proteins with pentatricopeptide repeat (PPR) motifs derived from plants) are nuclear-encoded and exclusively controlled at the RNA level organelles (chloroplasts and mitochondria), cutting, translation, splicing, RNA editing, genes specifically acting on RNA stability. PPR proteins are typically a motif of 35 amino acids and have a structure in which a PPR motif is about 10 contiguous amino acids. The combination of PPR motifs can be used for sequence-selective binding to RNA. PPR proteins are often comprised of PPR motifs of about 10 repeat domains. PPR domains or RNA-binding domains may be configured to be catalytically inactive. WO 2013/058404 incorporated herein by reference in its entirety.

[0352] In some embodiments, the fusion protein disclosed herein comprises a linker between the at least two RNA-binding polypeptides. In some embodiments, the linker is a peptide linker. In some embodiments, the peptide linker comprises one or more repeats of the tri-peptide GGS. In other embodiments, the linker is a non-peptide linker. In some embodiments, the non-peptide linker comprises polyethylene glycol (PEG), polypropylene glycol (PPG), co-poly(ethylene/propylene) glycol, polyoxyethylene (POE), polyurethane, polyphosphazene, polysaccharides, dextran, polyvinyl alcohol, polyvinylpyrrolidones, polyvinyl ethyl ether, polyacryl amide, polyacrylate, polycyanoacrylates, lipid polymers, chitins, hyaluronic acid, heparin, or an alkyl linker.

[0353] In some embodiments, the at least one RNA-binding protein does not require multimerization for RNA-binding activity. In some embodiments, the at least one RNA-binding protein is not a monomer of a multimer complex. In some embodiments, a multimer protein complex does not comprise the RNA binding protein. In some embodiments, the at least one of RNA-binding protein selectively binds to a target sequence within the RNA molecule. In some embodiments, the at least one RNA-binding protein does not comprise an affinity for a second sequence within the RNA molecule. In some embodiments, the at least one RNA-binding protein does not comprise a high affinity for or selectively bind a second sequence within the RNA molecule. In some embodiments, the at least one RNA-binding protein comprises between 2 and 1300 amino acids, inclusive of the endpoints.

[0354] In some embodiments, the sequence encoding the at least one RNA-binding protein of the fusion proteins disclosed herein further comprises a sequence encoding a nuclear localization signal (NLS). In some embodiments, the sequence encoding a nuclear localization signal (NLS) is positioned 3′ to the sequence encoding the RNA binding protein. In some embodiments, the at least one RNA-binding protein comprises an NLS at a C-terminus of the protein. In some embodiments, the sequence encoding the at least one RNA-binding protein further comprises a first sequence encoding a first NLS and a second sequence encoding a second NLS. In some embodiments, the sequence encoding the first NLS or the second NLS is positioned 3′ to the sequence encoding the RNA-binding protein. In some embodiments, the at least one RNA-binding protein comprises the first NLS or the second NLS at a C-terminus of the protein. In some embodiments, the at least one RNA-binding protein further comprises an NES (nuclear export signal) or other peptide tag or secretory signal.

[0355] In some embodiments, a fusion protein disclosed herein comprises the at least one RNA-binding protein as a first RNA-binding protein together with a second RNA-binding protein comprising or consisting of a nuclease domain. In some embodiments, the second RNA binding protein binds RNA in a manner in which it associates with RNA. In some embodiments, the second RNA binding protein associates with RNA in a manner in which it cleaves RNA.

[0356] In some embodiments, the second RNA-binding polypeptide is operably configured to the first RNA-binding polypeptide at the C-terminus of the first RNA-binding polypeptide. In some embodiments, the second RNA-binding polypeptide is operably configured to the first RNA-binding polypeptide at the N-terminus of the first RNA-binding polypeptide.

### Vectors

[0357] In some embodiments of the compositions and methods of the disclosure, a vector comprises a guide RNA of the disclosure. In some embodiments, the vector comprises at least one guide RNA of the disclosure. In some embodiments, the vector comprises one or more guide RNA(s) of the disclosure. In some embodiments, the vector comprises two or more guide RNAs of the disclosure. In some embodiments, the vector further comprises a fusion protein of the disclosure. In some embodiments, the fusion protein comprises a first RNA binding protein and a second RNA binding protein.

[0358] In some embodiments of the compositions and methods of the disclosure, a first vector comprises a guide RNA of the disclosure and a second vector comprises a fusion protein of the disclosure. In some embodiments, the first vector comprises at least one guide RNA of the disclosure. In some embodiments, the first vector comprises one or more guide RNA(s) of the disclosure. In some embodiments, the first vector comprises two or more guide RNA(s) of the disclosure. In some embodiments, the fusion protein comprises a first RNA binding protein and a second RNA binding protein. In some embodiments, the first vector and the second vector are identical. In some embodiments, the first vector and the second vector are not identical.

[0359] In some embodiments of the compositions and methods of the disclosure, the vector is or comprises a component of a “2-component RNA targeting system” comprising (a) nucleic acid sequence encoding a RNA-targeted fusion protein of the disclosure; and (b) a single guide RNA (sgRNA) sequence comprising: on its 5′ end, an RNA sequence (e.g., spacer sequence) that hybridizes to or specifically binds to a target RNA sequence; and on its 3′ end, an RNA sequence (e.g., scaffold sequence) capable of specifically binding to or associating with the CRISPR/Cas protein of the fusion protein; and wherein the 2-component RNA targeting system recognizes and alters the target RNA in a cell in the absence of a PAMmer. In some embodiments, the sequences of the 2-component system are comprised within a single (e.g., unitary) vector. In some embodiments, the spacer sequence of the 2-component system targets a repeat sequence selected from the group consisting of CUG, CCUG, CAG, and GGGGCC. In some embodiments, the spacer sequence of the 2-component system targets an RNA sequence involved in an adaptive immune response. In some embodiments, a spacer sequence of the 2-component system comprises a portion of a nucleic acid sequence encoding a protein component of an adaptive immune response, and wherein the protein component is selected from the group consisting of Beta-2-microglobulin (β2M), Human Leukocyte Antigen A (HLA-A), Human Leukocyte Antigen B (HLA-B), Human Leukocyte Antigen C (HLA-C), Cluster of Differentiation 28 (CD28), Cluster of Differentiation 80 (CD80), Cluster of Differentiation 86 (CD86), Inducible T-cell Costimulator (ICOS), ICOS Ligand (ICOSLG), OX40L, Interleukin 12 (IL12), and CC Chemokine Receptor 7 (CCR7). In some embodiments, the 2-component system comprises a spacer which is a portion of a nucleic acid sequence encoding a protein component of an adaptive immune response and which is about 20 or 21 nucleotides in length. In some embodiments, the 2-component system comprises a first and second spacer comprised within a singular gRNA. In some embodiments, the 2-component system comprises a first and second spacer sequence comprised within first and second gRNA sequences. In some embodiments, the first spacer targets a repeat sequence and the second spacer targets RNA involved in an adaptive immune response.

[0360] In some embodiments of the compositions and methods of the disclosure, a vector of the disclosure is a viral vector. In some embodiments, the viral vector comprises a sequence isolated or derived from a retrovirus. In some embodiments, the viral vector comprises a sequence isolated or derived from a lentivirus. In some embodiments, the viral vector comprises a sequence isolated or derived from an adenovirus. In some embodiments, the viral vector comprises a sequence isolated or derived from an adeno-associated virus (AAV). In some embodiments, the viral vector is replication incompetent. In some embodiments, the viral vector is isolated or recombinant. In some embodiments, the viral vector is self-complementary.

[0361] In some embodiments of the compositions and methods of the disclosure, the viral vector comprises a sequence isolated or derived from an adeno-associated virus (AAV). In some embodiments, the viral vector comprises an inverted terminal repeat sequence or a capsid sequence that is isolated or derived from an AAV of serotype AAV1, AAV2, AAV3, AAV4, AAV5, AAV6, AAV7, AAV8, AAV9, AAV10, AAV11 or AAV12. In some embodiments, the viral vector is replication incompetent. In some embodiments, the viral vector is isolated or recombinant (rAAV). In some embodiments, the viral vector is self-complementary (scAAV).

[0362] In some embodiments of the compositions and methods of the disclosure, a vector of the disclosure is a non-viral vector. In some embodiments, the vector comprises or consists of a nanoparticle, a micelle, a liposome or lipoplex, a polymersome, a polyplex or a dendrimer. In some embodiments, the vector is an expression vector or recombinant expression system. As used herein, the term “recombinant expression system” refers to a genetic construct for the expression of certain genetic material formed by recombination.

[0363] In some embodiments of the compositions and methods of the disclosure, an expression vector, viral vector or non-viral vector provided herein, includes without limitation, an expression control element. An “expression control element” as used herein refers to any sequence that regulates the expression of a coding sequence, such as a gene. Exemplary expression control elements include but are not limited to promoters, enhancers, microRNAs, post-transcriptional regulatory elements, polyadenylation signal sequences, and introns. Expression control elements may be constitutive, inducible, repressible, or tissue-specific, for example. A “promoter” is a control sequence that is a region of a polynucleotide sequence at which initiation and rate of transcription are controlled. It may contain genetic elements at which regulatory proteins and molecules may bind such as RNA polymerase and other transcription factors. In some embodiments, expression control by a promoter is tissue-specific. Non-limiting exemplary promoters include CMV, CBA, CAG, Cbh, EF-1a, PGK, UBC, GUSB, UCOE, hAAT, TBG, Desmin, MCK, C5-12, NSE, Synapsin, PDGF, MecP2, CaMKII, mGluR2, NFL, NFH, nP2, PPE, ENK, EAAT2, GFAP, MBP, and U6 promoters. An “enhancer” is a region of DNA that can be bound by activating proteins to increase the likelihood or frequency of transcription. Non-limiting exemplary enhancers and posttranscriptional regulatory elements include the CMV enhancer and WPRE.

[0364] In some embodiments of the compositions and methods of the disclosure, an expression vector, viral vector or non-viral vector provided herein, includes without limitation, vector elements such as an IRES or 2A peptide sites for configuration of “multicistronic” or “polycistronic” or “bicistronic” or tricistronic” constructs, i.e., having double or triple or multiple coding areas or exons, and as such will have the capability to express from mRNA two or more proteins from a single construct. Multicistronic vectors simultaneously express two or more separate proteins from the same mRNA. The two strategies most widely used for constructing multicistronic configurations are through the use of an IRES or a 2A self-cleaving site. An “IRES” refers to an internal ribosome entry site or portion thereof of viral, prokaryotic, or eukaryotic origin which are used within polycistronic vector constructs. In some embodiments, an IRES is an RNA element that allows for translation initiation in a cap-independent manner. The term “self-cleaving peptides” or “sequences encoding self-cleaving peptides” or “2A self-cleaving site” refer to linking sequences which are used within vector constructs to incorporate sites to promote ribosomal skipping and thus to generate two polypeptides from a single promoter, such self-cleaving peptides include without limitation, T2A, and P2A peptides or sequences encoding the self-cleaving peptides.

[0365] In some embodiments, the vector is a viral vector. In some embodiments, the vector is an adenoviral vector, an adeno-associated viral (AAV) vector, or a lentiviral vector. In some embodiments, the vector is a retroviral vector, an adenoviral/retroviral chimera vector, a herpes simplex viral I or II vector, a parvoviral vector, a reticuloendotheliosis viral vector, a polioviral vector, a papillomaviral vector, a vaccinia viral vector, or any hybrid or chimeric vector incorporating favorable aspects of two or more viral vectors. In some embodiments, the vector further comprises one or more expression control elements operably linked to the polynucleotide. In some embodiments, the vector further comprises one or more selectable markers. In some embodiments, the AAV vector has low toxicity. In some embodiments, the AAV vector does not incorporate into the host genome, thereby having a low probability of causing insertional mutagenesis. In some embodiments, the AAV vector can encode a range total of polynucleotides from 4.5 kb to 4.75 kb. In some embodiments, exemplary AAV vectors that may be used in any of the herein described compositions, systems, methods, and kits can include an AAV1 vector, a modified AAV1 vector, an AAV2 vector, a modified AAV2 vector, an AAV3 vector, a modified AAV3 vector, an AAV4 vector, a modified AAV4 vector, an AAV5 vector, a modified AAV5 vector, an AAV6 vector, a modified AAV6 vector, an AAV7 vector, a modified AAV7 vector, an AAV8 vector, an AAV9 vector, an AAV.rh10 vector, a modified AAV.rh10 vector, an AAV.rh32/33 vector, a modified AAV.rh32/33 vector, an AAV.rh43 vector, a modified AAV.rh43 vector, an AAV.rh64R1 vector, and a modified AAV.rh64R1 vector and any combinations or equivalents thereof. In some embodiments, the lentiviral vector is an integrase-competent lentiviral vector (ICLV). In some embodiments, the lentiviral vector can refer to the transgene plasmid vector as well as the transgene plasmid vector in conjunction with related plasmids (e.g., a packaging plasmid, a rev expressing plasmid, an envelope plasmid) as well as a lentiviral-based particle capable of introducing exogenous nucleic acid into a cell through a viral or viral-like entry mechanism. Lentiviral vectors are well-known in the art (see, e.g., Trono D. (2002) Lentiviral vectors, New York: Spring-Verlag Berlin Heidelberg and Durand et al. (2011) Viruses 3(2):132-159 doi: 10.3390/v3020132). In some embodiments, exemplary lentiviral vectors that may be used in any of the herein described compositions, systems, methods, and kits can include a human immunodeficiency virus (HIV) 1 vector, a modified human immunodeficiency virus (HIV) 1 vector, a human immunodeficiency virus (HIV) 2 vector, a modified human immunodeficiency virus (HIV) 2 vector, a sooty mangabey simian immunodeficiency virus (SIV_{SM}) vector, a modified sooty mangabey simian immunodeficiency virus (SIV_{SM}) vector, a African green monkey simian immunodeficiency virus (SIV_{AGM}) vector, a modified African green monkey simian immunodeficiency virus (SIV_{AGM}) vector, an equine infectious anemia virus (EIAV) vector, a modified equine infectious anemia virus (EIAV) vector, a feline immunodeficiency virus (FIV) vector, a modified feline immunodeficiency virus (FIV) vector, a Visna/maedi virus (VNV/VMV) vector, a modified Visna/maedi virus (VNV/VMV) vector, a caprine arthritis-encephalitis virus (CAEV) vector, a modified caprine arthritis-encephalitis virus (CAEV) vector, a bovine immunodeficiency virus (BIV), or a modified bovine immunodeficiency virus (BIV).

### Nucleic Acids

[0366] Provided herein are the nucleic acid sequences encoding the fusion proteins disclosed herein for use in gene transfer and expression techniques described herein. It should be understood, although not always explicitly stated that the sequences provided herein can be used to provide the expression product as well as substantially identical sequences that produce a protein that has the same biological properties. These “biologically equivalent” or “biologically active” or “equivalent” polypeptides are encoded by equivalent polynucleotides as described herein. They may possess at least 60%, or alternatively, at least 65%, or alternatively, at least 70%, or alternatively, at least 75%, or alternatively, at least 80%, or alternatively at least 85%, or alternatively at least 90%, or alternatively at least 95% or alternatively at least 98%, identical primary amino acid sequence to the reference polypeptide when compared using sequence identity methods run under default conditions. Specific polypeptide sequences are provided as examples of particular embodiments. Modifications to the sequences to amino acids with alternate amino acids that have similar charge. Additionally, an equivalent polynucleotide is one that hybridizes under stringent conditions to the reference polynucleotide or its complement or in reference to a polypeptide, a polypeptide encoded by a polynucleotide that hybridizes to the reference encoding polynucleotide under stringent conditions or its complementary strand. Alternatively, an equivalent polypeptide or protein is one that is expressed from an equivalent polynucleotide.

[0367] The nucleic acid sequences (e.g., polynucleotide sequences) disclosed herein may be codon-optimized which is a technique well known in the art. In some embodiments disclosed herein, exemplary Cas sequences, such as e.g., SEQ ID NO: 46 (Cas13d), are codon optimized for expression in human cells. Codon optimization refers to the fact that different cells differ in their usage of particular codons. This codon bias corresponds to a bias in the relative abundance of particular tRNAs in the cell type. By altering the codons in the sequence to match with the relative abundance of corresponding tRNAs, it is possible to increase expression. It is also possible to decrease expression by deliberately choosing codons for which the corresponding tRNAs are known to be rare in a particular cell type. Codon usage tables are known in the art for mammalian cells, as well as for a variety of other organisms. Based on the genetic code, nucleic acid sequences coding for, e.g., a Cas protein, can be generated. In some embodiments, such a sequence is optimized for expression in a host or target cell, such as a host cell used to express the Cas protein or a cell in which the disclosed methods are practiced (such as in a mammalian cell, e.g., a human cell). Codon preferences and codon usage tables for a particular species can be used to engineer isolated nucleic acid molecules encoding a Cas protein (such as one encoding a protein having at least 80%, at least 85%, at least 90%, at least 92%, at least 95%, at least 96%, at least 97%, at least 98%, at least 99%, or 100% sequence identity to its corresponding wild-type protein) that takes advantage of the codon usage preferences of that particular species. For example, the Cas proteins disclosed herein can be designed to have codons that are preferentially used by a particular organism of interest. In one example, a Cas nucleic acid sequence is optimized for expression in human cells, such as one having at least 70%, at least 80%, at least 85%, at least 90%, at least 92%, at least 95%, at least 98%, or at least 99% sequence identity to its corresponding wild-type or originating nucleic acid sequence. In some embodiments, an isolated nucleic acid molecule encoding at least one Cas protein (which can be part of a vector) includes at least one Cas protein coding sequence that is codon optimized for expression in a eukaryotic cell, or at least one Cas protein coding sequence codon optimized for expression in a human cell. In one embodiment, such a codon optimized Cas coding sequence has at least 80%, at least 85%, at least 90%, at least 92%, at least 95%, at least 96%, at least 97%, at least 98%, at least 99%, or 100% sequence identity to its corresponding wild-type or originating sequence. In another embodiment, a eukaryotic cell codon optimized nucleic acid sequence encodes a Cas protein having at least 85%, at least 90%, at least 92%, at least 95%, at least 96%, at least 97%, at least 98%, at least 99%, or 100% sequence identity to its corresponding wild-type or originating protein. In another embodiment, a variety of clones containing functionally equivalent nucleic acids may be routinely generated, such as nucleic acids which differ in sequence but which encode the same Cas protein sequence. Silent mutations in the coding sequence result from the degeneracy (i.e., redundancy) of the genetic code, whereby more than one codon can encode the same amino acid residue. Thus, for example, leucine can be encoded by CTT, CTC, CTA, CTG, TTA, or TTG; serine can be encoded by TCT, TCC, TCA, TCG, AGT, or AGC; asparagine can be encoded by AAT or AAC; aspartic acid can be encoded by GAT or GAC; cysteine can be encoded by TGT or TGC; alanine can be encoded by GCT, GCC, GCA, or GCG; glutamine can be encoded by CAA or CAG; tyrosine can be encoded by TAT or TAC; and isoleucine can be encoded by ATT, ATC, or ATA. Tables showing the standard genetic code can be found in various sources (see, for example, Stryer, 1988, Biochemistry, 3.sup.rd Edition, W.H. 5 Freeman and Co., NY).

[0368] “Hybridization” refers to a reaction in which one or more polynucleotides react to form a complex that is stabilized via hydrogen bonding between the bases of the nucleotide residues. The hydrogen bonding may occur by Watson-Crick base pairing, Hoogstein binding, or in any other sequence-specific manner. The complex may comprise two strands forming a duplex structure, three or more strands forming a multi-stranded complex, a single self-hybridizing strand, or any combination of these. A hybridization reaction may constitute a step in a more extensive process, such as the initiation of a PC reaction, or the enzymatic cleavage of a polynucleotide by a ribozyme.

[0369] Examples of stringent hybridization conditions include: incubation temperatures of about 25° C. to about 37° C.; hybridization buffer concentrations of about 6×SSC to about 10×SSC; formamide concentrations of about 0% to about 25%; and wash solutions from about 4×SSC to about 8×SSC. Examples of moderate hybridization conditions include: incubation temperatures of about 40° C. to about 50° C.; buffer concentrations of about 9×SSC to about 2×SSC; formamide concentrations of about 30% to about 50%; and wash solutions of about 5×SSC to about 2×SSC. Examples of high stringency conditions include: incubation temperatures of about 55° C. to about 68° C.; buffer concentrations of about 1×SSC to about 0.1×SSC; formamide concentrations of about 55% to about 75%; and wash solutions of about 1×SSC, 0.1×SSC, or deionized water. In general, hybridization incubation times are from 5 minutes to 24 hours, with 1, 2, or more washing steps, and wash incubation times are about 1, 2, or 15 minutes. SSC is 0.15 M NaCl and 15 mM citrate buffer. It is understood that equivalents of SSC using other buffer systems can be employed. “Homology” or “identity” or “similarity” refers to sequence similarity between two peptides or between two nucleic acid molecules. Homology can be determined by comparing a position in each sequence which may be aligned for purposes of comparison. When a position in the compared sequence is occupied by the same base or amino acid, then the molecules are homologous at that position. A degree of homology between sequences is a function of the number of matching or homologous positions shared by the sequences. An “unrelated” or “non-homologous” sequence shares less than 40% identity, or alternatively less than 25% identity, with one of the sequences of the present invention.

### Cells

[0370] In some embodiments of the compositions and methods of the disclosure, a cell of the disclosure is a prokaryotic cell.

[0371] In some embodiments of the compositions and methods of the disclosure, a cell of the disclosure is a eukaryotic cell. In some embodiments, the cell is a mammalian cell. In some embodiments, the cell is a bovine, murine, feline, equine, porcine, canine, simian, or human cell. In some embodiments, the cell is a non-human mammalian cell such as a non-human primate cell.

[0372] In some embodiments, a cell of the disclosure is a somatic cell. In some embodiments, a cell of the disclosure is a germline cell. In some embodiments, a germline cell of the disclosure is not a human cell.

[0373] In some embodiments of the compositions and methods of the disclosure, a cell of the disclosure is a stem cell. In some embodiments, a cell of the disclosure is an embryonic stem cell. In some embodiments, an embryonic stem cell of the disclosure is not a human cell. In some embodiments, a cell of the disclosure is a multipotent stem cell or a pluripotent stem cell. In some embodiments, a cell of the disclosure is an adult stem cell. In some embodiments, a cell of the disclosure is an induced pluripotent stem cell (iPSC). In some embodiments, a cell of the disclosure is a hematopoetic stem cell (HSC).

[0374] In some embodiments of the compositions and methods of the disclosure, a somatic cell of the disclosure is an immune cell. In some embodiments, an immune cell of the disclosure is a lymphocyte. In some embodiments, an immune cell of the disclosure is a T lymphocyte (also referred to herein as a T-cell). Exemplary T-cells of the disclosure include, but are not limited to, naïve T cells, effector T cells, helper T cells, memory T cells, regulatory T cells (Tregs) and Gamma delta T cells. In some embodiments, an immune cell of the disclosure is a B lymphocyte. In some embodiments, an immune cell of the disclosure is a natural killer cell. In some embodiments, an immune cell of the disclosure is an antigen-presenting cell.

[0375] In some embodiments of the compositions and methods of the disclosure, a somatic cell of the disclosure is a muscle cell. In some embodiments, a muscle cell of the disclosure is a myoblast or a myocyte. In some embodiments, a muscle cell of the disclosure is a cardiac muscle cell, skeletal muscle cell or smooth muscle cell. In some embodiments, a muscle cell of the disclosure is a striated cell.

[0376] In some embodiments of the compositions and methods of the disclosure, a somatic cell of the disclosure is an epithelial cell. In some embodiments, an epithelial cell of the disclosure forms a squamous cell epithelium, a cuboidal cell epithelium, a columnar cell epithelium, a stratified cell epithelium, a pseudostratified columnar cell epithelium or a transitional cell epithelium. In some embodiments, an epithelial cell of the disclosure forms a gland including, but not limited to, a pineal gland, a thymus gland, a pituitary gland, a thyroid gland, an adrenal gland, an apocrine gland, a holocrine gland, a merocrine gland, a serous gland, a mucous gland and a sebaceous gland. In some embodiments, an epithelial cell of the disclosure contacts an outer surface of an organ including, but not limited to, a lung, a spleen, a stomach, a pancreas, a bladder, an intestine, a kidney, a gallbladder, a liver, a larynx or a pharynx. In some embodiments, an epithelial cell of the disclosure contacts an outer surface of a blood vessel or a vein.

[0377] In some embodiments of the compositions and methods of the disclosure, a somatic cell of the disclosure is a neuronal cell. In some embodiments, a neuron cell of the disclosure is a neuron of the central nervous system. In some embodiments, a neuron cell of the disclosure is a neuron of the brain or the spinal cord. In some embodiments, a neuron cell of the disclosure is a neuron of the retina. In some embodiments, a neuron cell of the disclosure is a neuron of a cranial nerve or an optic nerve. In some embodiments, a neuron cell of the disclosure is a neuron of the peripheral nervous system. In some embodiments, a neuron cell of the disclosure is a neuroglial or a glial cell. In some embodiments, a glial of the disclosure is a glial cell of the central nervous system including, but not limited to, oligodendrocytes, astrocytes, ependymal cells, and microglia. In some embodiments, a glial of the disclosure is a glial cell of the peripheral nervous system including, but not limited to, Schwann cells and satellite cells.

[0378] In some embodiments of the compositions and methods of the disclosure, a somatic cell of the disclosure is a primary cell.

[0379] In some embodiments of the compositions and methods of the disclosure, a somatic cell of the disclosure is a cultured cell.

[0380] In some embodiments of the compositions and methods of the disclosure, a somatic cell of the disclosure is in vivo, in vitro, ex vivo or in situ.

[0381] In some embodiments of the compositions and methods of the disclosure, a somatic cell of the disclosure is autologous or allogeneic.

### Masking Modified Cells of the Disclosure

[0382] Compositions of the disclosure simultaneously deliver a gene therapy and prevent expression of antigens derived from the gene therapy construct or associated delivery vector from display on the surface of a modified cell of the disclosure.

[0383] By inhibiting or reducing expression of a component of an adaptive immune response in the modified cell, the modified cell is invisible to a host immune system. For example, compositions of the disclosure may simultaneously target an RNA molecule associated with a genetic disease or disorder and an RNA molecule that encodes the β2M subunit of the MHC I. By selectively targeting an RNA molecule that encodes the β2M subunit of the MHC I, the composition prevents the modified cell from displaying one or more antigen peptides derived from an RNA targeting construct, vector, or combination thereof on the surface of the modified cell. Consequently, a subject's immune system does not identify the modified cell as containing foreign sequences and does not attempt to mount an immune response directed at the modified cell. This method increases the therapeutic efficacy of the treatment of the genetic disease or disorder while avoiding a common side effect of gene therapy.

[0384] In some embodiments of the compositions and methods of the disclosure, the component of an adaptive immune response comprises or consists of a component of a type I major histocompatibility complex (MHC I), a type II major histocompatibility complex (MHC II), a T-cell receptor (TCR), a costimulatory molecule or a combination thereof. In some embodiments, the MHC I component comprises an α1 chain, an α2 chain, an α3 chain, or a β2M protein. In some embodiments, the component of an adaptive immune response comprises or consists of an MHC I β2M protein. In some embodiments, the MHC II component comprises an α1 chain, an α2 chain, a β1 chain, or a β2 chain. In some embodiments, the TCR component comprises an α-chain and a β-chain. In some embodiments, the costimulatory molecule comprises a Cluster of Differentiation 28 (CD28), a Cluster of Differentiation 80 (CD80), a Cluster of Differentiation 86 (CD86), an Inducible T-cell COStimulator (ICOS), or an ICOS Ligand (ICOSLG) protein.

[0385] An α-chain of an MHC I may be encoded by an HLA gene, including but not limited to, HLA-A, HLA-B and HLA-C.

[0386] Compositions of the disclosure may comprise a gRNA comprising a spacer sequence that specifically binds to a target sequence of an RNA molecule encoding an α-chain derived from an HLA-A gene comprising or consisting of 20 nucleotides of the sequence of

| (SEQ ID NO: 216) | |
|---|---|
| 1 | atggccgtca tggcgccccg aaccctcgtc ctgctactct cgggggctct ggccctgacc |
| 61 | cagacctggg cgggctctca ctccatgagg tatttcttca catccgtgtc ccggcccggc |
| 121 | cgcggggagc cccgcttcat cgcagtgggc tacgtggacg acacgcagtt cgtgcggttc |
| 181 | gacagcgacg ccgcgagcca gaggatggag ccgcgggcgc cgtggataga gcaggagggt |
| 241 | ccggagtatt gggacgggga gacacggaaa gtgaaggccc actcacagac tcaccgagtg |
| 301 | gacctgggga ccctgcgcgg ctactacaac cagagcgagg ccggttctca caccgtccag |
| 361 | aggatgtgtg gctgcgacgt ggggtcggac tggcgcttcc tccgcgggta ccaccagtac |
| 421 | gcctacgacg gcaaggatta catcgccctg aaagaggacc tgcgctcttg gaccgcggcg |
| 481 | gacatggcag ctcagaccac caagcacaag tgggaggcgg cccatgtggc ggagcagttg |
| 541 | agagcctacc tggagggcac gtgcgtggag tggctccgca gatacctgga gaacgggaag |
| 601 | gagacgctgc agcgcacgga cgcccccaaa acgcatatga ctcaccacgc tgtctctgac |
| 661 | catgaagcca ccctgaggtg ctgggccctg agcttctacc ctgcggagat cacactgacc |
| 721 | tggcagcggg atggggagga ccagacccag gacacggagc tcgtggagac caggcctgca |
| 781 | ggggatggaa ccttccagaa gtgggcggct gtggtggtgc cttctggaca ggagcagaga |
| 841 | taaacctgcc atgtgcagca tgagggtttg cccaagcccc tcaccctgag atgggagccg |
| 901 | tcttcccagc ccaccatccc catcgtgggc atcattgctg gcctggttct ctttggagct |
| 961 | gtgatcactg gagctgtggt cgctgctgtg atgtggagga ggaagagctc agatagaaaa |
| 1021 | ggagggagct actctcaggc tgcaagcagt gacagtgccc agggctctga tgtgtctctc |
| 1081 | acagcttgta aagtgtga. |

[0387] Compositions of the disclosure may comprise a gRNA comprising a spacer sequence that specifically binds to a target sequence of an RNA molecule encoding an α-chain derived from an HLA-B gene comprising or consisting of 20 nucleotides of the sequence of

| (SEQ ID NO: 217) | |
|---|---|
| 1 | tggtgtagga gaagagggat caggacgaag tcccaggccc cgggcggggc tctcagggtc |
| 61 | tcaggctccg agggccgcgt ctgcaatggg gaggcgcagc gttggggatt ccccactccc |
| 121 | acgagtttca cttcttctcc caacctatgt cgggtccttc ttccaggata ctcgtgacgc |
| 181 | gtccccattt cccactccca ttgggtgtcg ggtgtctaga gaagccaatc agcgtcgccg |
| 241 | tggtcccagt tctaaagtcc ccacgcaccc acccggactc agaatctcct cagacgccga |
| 301 | gatgcgggtc acggcacccc gaaccgtcct cctgctgctc tcggcggccc tggccctgac |
| 361 | cgagacctgg gccggtgagt gcgggtcggc agggaaatgg cctctgtggg gaggagcgag |
| 421 | gggaccgcag gcgggggcgc aggacccggg gagccgcgcc gggaggaggg tcgggcgggt |
| 481 | ctcagcccct cctcgccccc aggctcccac tccatgaggt atttccacac cgccatgtcc |
| 541 | cggcccggcc gcggggagcc ccgcttcatc accgtgggct acgtggacga cacgctgttc |
| 601 | gtgaggttcg acagcgacgc cacgagtccg aggaaggagc cgcgggcgcc atggatagag |
| 661 | caggaggggc cggagtattg ggaccgggag acacagatct ccaagaccaa cacacagact |
| 721 | taccgagaga gcctgcggaa cctgcgcggc tactacaacc agagcgaggc cggtgagtga |
| 781 | ccccggcccg gggcgcaggt cacgactccc catcccccac gtacggcccg ggtcgccccg |
| 841 | agtctccggg tccgagatcc gcccccctga ggccgcggga cccgcccaga ccctcgaccg |
| 901 | gcgagagccc caggcgcgtt tacccggttt cattttcagt tgaggccaaa atccccgcgg |
| 961 | gttggtcggg gcggggcggg gcggggctcg ggggacgggg ctgaccgcgg ggcctgggcc |
| 1021 | agggtctcac acttggcaga ggatgtatgg ctgcgacctg gggcccgacg ggcgcctcct |
| 1081 | ccgcgggtat aaccagttag cctacgacgg caaggattac atcgccctga acgaggacct |
| 1141 | gagctcctgg accgcggcgg acaccgcggc tcagatcacc cagcgcaagt gggaggcggc |
| 1201 | ccgtgtggcg gagcaggaca gagcctacct ggagggcctg tgcgtggagt cgctccgcag |
| 1261 | atacctggag aacgggaagg agacgctgca gcgcgcgggt accaggggca gtggggagcc |
| 1321 | ttccccatct cctataggtc gccggggatg gcctcccacg agaagaggag gaaaatggga |
| 1381 | tcagcgctag aatgtcgccc tcccttgaat ggagaatggc atgagttttc ctgagtttcc |
| 1441 | tctgagggcc ccctcttctc tctaggacaa taaggaatga cgtctctgag gaaatggagg |
| 1501 | ggaagacagt ccctagaata ctgatcaggg gtcccctttg acccctgcag cagccttggg |
| 1561 | aaccgtgact ttcctctcag gccttgttct ctgcctcaca ctcagtgtgt ttggggctct |
| 1621 | gattccagca cttctgagtc actttacctc cactcagatc gggagcagaa gtccctgttc |
| 1681 | cccgctcaga gactcgaact ttccaatgaa taggagatta tcccaggtgc ctgcgtccag |
| 1741 | gctggtgtct gggttctgtg ccccttcccc accccaggtg tcctgtccat tctcaggctg |
| 1801 | gtcacatggg tggtcctagg gtgtcccatg agagatgcaa agcgcctgaa ttttctgact |
| 1861 | cttcccatca gaccccccaa agacacatgt gacccaccac cccatctctg accatgaggc |
| 1921 | caccctgagg tgctgggccc tgggcttcta ccctgcggag atcacactga cctggcagcg |
| 1981 | ggatggcgag gaccaaactc aggacaccga gcttgtggag accagaccag caggagatag |
| 2041 | aaccttccag aagtgggcag ctgtggtggt gccttctgga gaagagcaga gatacacatg |
| 2101 | ccatgtacag catgaggggc tgccgaagcc cctcaccctg agatggggta aggaggggga |
| 2161 | tgaggggtca tatctgttct cagggaaagc aggagccctt ctggagccct tcagcagggt |
| 2221 | cagggcccct catcttcccc tcctttccca gagccatctt cccagtccac catccccatc |
| 2281 | gtgggcattg ttgctggcct ggctgtccta gcagttgtgg tcatcggagc tgtggtcgct |
| 2341 | actgtgatgt gtaggaggaa gagctcaggt agggaagggg tgaggggtgg ggtctgggtt |
| 2401 | ttcttgtccc actgggggtt tcaagcccca ggtagaagtg ttccctgcct cattactggg |
| 2461 | aagcagcatc cacacagggg ctaacgcagc ctgggaccct gtgtgccagc acttactctt |
| 2521 | ttgtgcagca catgtgacaa tgaaggacgg atgtatcgcc ttgatggttg tggtgttggg |
| 2581 | gtcctgattc cagcattcat gagtcagggg aaggtccctg ctaaggacag accttaggag |
| 2641 | ggcagttggt ccaggaccca cacttgcttt cctcgtgttt cctgatcctg ccttgggtct |
| 2701 | gtagtcatac ttctggaaat tccttttggt tccaagacga ggaggttcct ctaagatctc |
| 2761 | atggccctgc ttcctcccag tcccctcaca ggacattttc ttcccacagg tggaaaagga |
| 2821 | gggagctact ctcaggctgc gtgtaagtgg tgggggtggg agtgtggagg agctcaccca |
| 2881 | ccccataatt cctcctgtcc cacgtctcct gagggctctg accaggtcct gtttttgttc |
| 2941 | tactccagcc agcgacagtg cccagggctc tgatgtgtct ctcacagctt gaaaaggtga |
| 3001 | gattcttggg gtctagagtg ggtggggtgg cgggtctggg ggtgggtggg gcagtgggga |
| 3061 | aaggcctggg taatggagat tctttgattg ggatgtttcg cgtgtgtggt gggctgttca |
| 3121 | gagtgtcatc acttaccatg actaaccaga atttgttcat gactgttgtt ttctgtagcc |
| 3181 | tgagacagct gtcttgtgag ggactgagat gcaggatttc ttcacgcctc ccctttgtga |
| 3241 | cttcaagagc ctctggcatc tctttctgca aaggcacctg aatgtgtctg cgtccctgtt |
| 3301 | agcataatgt gaggaggtgg agagacagcc cacccttgtg tccactgtga cccctgttcg |
| 3361 | catgctgacc tgtgtttcct cccca. |

[0388] Compositions of the disclosure may comprise a gRNA comprising a spacer sequence that specifically binds to a target sequence of an RNA molecule encoding an α-chain derived from an HLA-C gene comprising or consisting of 20 nucleotides of the sequence of

| (SEQ ID NO: 218) | |
|---|---|
| 1 | tccgcagtcc cggttctaaa gtccccagtc acccacccgg actcacattc tccccagagg |
| 61 | ccgagatgcg ggtcatggcg ccccgagccc tcctcctgct gctctcggga ggcctggccc |
| 121 | tgaccgagac ctgggcctgc tcccactcca tgaggtattt cgacaccgcc gtgtcccggc |
| 181 | ccggccgcgg agagccccgc ttcatctcag tgggctacgt ggacgacacg cagttcgtgc |
| 241 | ggttcgacag cgacgccgcg agtccgagag gggagccgcg ggcgccgtgg gtggagcagg |
| 301 | aggggccgga gtattgggac cgggagacac agaagtacaa gcgccaggca caggctgacc |
| 361 | gagtgagcct gcggaacctg cgcggctact acaaccagag cgaggacggg tctcacaccc |
| 421 | tccagaggat gtctggctgc gacctggggc ccgacgggcg cctcctccgc gggtatgacc |
| 481 | agtccgccta cgacggcaag gattacatcg ccctgaacga ggacctgcgc tcctggaccg |
| 541 | ccgcggacac cgcggctcag atcacccagc gcaagttgga ggcggcccgt gcggcggagc |
| 601 | agctgagagc ctacctggag ggcacgtgcg tggagtggct ccgcagatac ctggagaacg |
| 661 | ggaaggagac gctgcagcgc gcagaacccc caaagacaca cgtgacccac caccccctct |
| 721 | ctgaccatga ggccaccctg aggtgctggg ccctgggctt ctaccctgcg gagatcacac |
| 781 | tgacctggca gcgggatggg gaggaccaga cccaggacac cgagcttgtg gagaccaggc |
| 841 | cagcaggaga tggaaccttc cagaagtggg cagctgtggt ggtgccttct ggacaagagc |
| 901 | agagatacac gtgccatatg cagcacgagg ggctgcaaga gcccctcacc ctgagctggg |
| 961 | agccatcttc ccagcccacc atccccatca tgggcatcgt tgctggcctg gctgtcctgg |
| 1021 | ttgtcctagc tgtccttgga gctgtggtca ccgctatgat gtgtaggagg aagagctcag |
| 1081 | gtggaaaagg agggagctgc tctcaggctg cgtgcagcaa cagtgcccag ggctctgatg |
| 1141 | agtctctcat cacttgtaaa gcctgagaca gctgcctgtg tgggactgag atgcaggatt |
| 1201 | tcttcacacc tctcctttgt gacttcaaga gcctctggca tctctttctg caaaggcacc |
| 1261 | tgaatgtgtc tgcgttcctg ttagcataat gtgaggaggt ggagagacag cccacccccg |
| 1321 | tgtccaccgt gacccctgtc cccacactga cctgtgttcc ctccccgatc atctttcctg |
| 1381 | ttccagagag gtggggctgg atgtctccat ctctgtctca aattcatggt gcactgagct |
| 1441 | gcaacttctt acttccctaa tgaagttaag aacctgaata taaatttgtg ttctcaaata |
| 1501 | tttgctatga agcgttgatg gattaattaa ataagtcaat tcctagaagt tgagagagca |
| 1561 | aataaagacc tgagaacctt ccagaa. |

[0389] Compositions of the disclosure may comprise a gRNA comprising a spacer sequence that specifically binds to a target sequence of an RNA molecule encoding an α-chain derived from an HLA-C gene comprising or consisting of 20 nucleotides of the sequence of

| (SEQ ID NO: 219) | |
|---|---|
| 1 | tccgcagtcc cggttctaaa gtccccagtc acccacccgg actcacattc tccccagagg |
| 61 | ccgagatgcg ggtcatggcg ccccgagccc tcctcctgct gctctcggga ggcctggccc |
| 121 | tgaccgagac ctgggcctgc tcccactcca tgaggtattt cgacaccgcc gtgtcccggc |
| 181 | ccggccgcgg agagccccgc ttcatctcag tgggctacgt ggacgacacg cagttcgtgc |
| 241 | ggttcgacag cgacgccgcg agtccgagag gggagccgcg ggcgccgtgg gtggagcagg |
| 301 | aggggccgga gtattgggac cgggagacac agaactacaa gcgccaggca caggctgacc |
| 361 | gagtgagcct gcggaacctg cgcggctact acaaccagag cgaggacggg tctcacaccc |
| 421 | tccagaggat gtatggctgc gacctggggc ccgacgggcg cctcctccgc gggtatgacc |
| 481 | agtccgccta cgacggcaag gattacatcg ccctgaacga ggacctgcgc tcctggaccg |
| 541 | ccgcggacac cgcggctcag atcacccagc gcaagttgga ggcggcccgt gcggcggagc |
| 601 | agctgagagc ctacctggag ggcacgtgcg tggagtggct ccgcagatac ctggagaacg |
| 661 | ggaaggagac gctgcagcgc gcagaacccc caaagacaca cgtgacccac caccccctct |
| 721 | ctgaccatga ggccaccctg aggtgctggg ccctgggctt ctaccctgcg gagatcacac |
| 781 | tgacctggca gcgggatggg gaggaccaga cccaggacac cgagcttgtg gagaccaggc |
| 841 | cagcaggaga tggaaccttc cagaagtggg cagctgtggt ggtgccttct ggacaagagc |
| 901 | agagatacac gtgccatatg cagcacgagg ggctgcaaga gcccctcacc ctgagctggg |
| 961 | agccatcttc ccagcccacc atccccatca tgggcatcgt tgctggcctg gctgtcctgg |
| 1021 | ttgtcctagc tgtccttgga gctgtggtca ccgctatgat gtgtaggagg aagagctcag |
| 1081 | gtggaaaagg agggagctgc tctcaggctg cgtgcagcaa cagtgcccag ggctctgatg |
| 1141 | agtctctcat cacttgtaaa gcctgagaca gctgcctgtg tgggactgag atgcaggatt |
| 1201 | tcttcacacc tctcctttgt gacttcaaga gcctctggca tctctttctg caaaggcgtc |
| 1261 | tgaatgtgtc tgcgttcctg ttagcataat gtgaggaggt ggagagacag cccacccccg |
| 1321 | tgtccaccgt gacccctgtc cccacactga cctgtgttcc ctccccgatc atctttcctg |
| 1381 | ttccagagag gtggggctgg atgtctccat ctctgtctca aattcatggt gcactgagct |
| 1441 | gcaacttctt acttccctaa tgaagttaag aacctgaata taaatttgtg ttctcaaata |
| 1501 | tttgctatga agcgttgatg gattaattaa ataagtcaat tcctagaagt tgagagagca |
| 1561 | aataaagacc tgagaacctt ccagaa. |

[0390] Compositions of the disclosure may comprise a gRNA comprising a spacer sequence that specifically binds to a target sequence of an RNA molecule encoding an β2M protein comprising or consisting of 20 nucleotides of the sequence of

| (SEQ ID NO: 220) | |
|---|---|
| 1 | attcctgaag ctgacagcat tcgggccgag atgtctcgct ccgtggcctt agctgtgctc |
| 61 | gcgctactct ctctttctgg cctggaggct atccagcgta ctccaaagat tcaggtttac |
| 121 | tcacgtcatc cagcagagaa tggaaagtca aatttcctga attgctatgt gtctgggttt |
| 181 | catccatccg acattgaagt tgacttactg aagaatggag agagaattga aaaagtggag |
| 241 | cattcagact tgtctttcag caaggactgg tctttctatc tcttgtacta cactgaattc |
| 301 | acccccactg aaaaagatga gtatgcctgc cgtgtgaacc atgtgacttt gtcacagccc |
| 361 | aagatagtta agtgggatcg agacatgtaa gcagcatcat ggaggtttga agatgccgca |
| 421 | tttggattgg atgaattcca aattctgctt gcttgctttt taatattgat atgcttatac |
| 481 | acttacactt tatgcacaaa atgtagggtt ataataatgt taacatggac atgatcttct |
| 541 | ttataattct actttgagtg ctgtctccat gtttgatgta tctgagcagg ttgctccaca |
| 601 | ggtagctcta ggagggctgg caacttagag gtggggagca gagaattctc ttatccaaca |
| 661 | tcaacatctt ggtcagattt gaactcttca atctcttgca ctcaaagctt gttaagatag |
| 721 | ttaagcgtgc ataagttaac ttccaattta catactctgc ttagaatttg ggggaaaatt |
| 781 | tagaaatata attgacagga ttattggaaa tttgttataa tgaatgaaac attttgtcat |
| 841 | ataagattca tatttacttc ttatacattt gataaagtaa ggcatggttg tggttaatct |
| 901 | ggtttatttt tgttccacaa gttaaataaa tcataaaact tgatgtgtta tctcttatat |
| 961 | ctcactccca ctattacccc tttattttca aacagggaaa cagtcttcaa gttccacttg |
| 1021 | gtaaaaaatg tgaacccctt gtatatagag tttggctcac agtgtaaagg gcctcagtga |
| 1081 | ttcacatttt ccagattagg aatctgatgc tcaaagaagt taaatggcat agttggggtg |
| 1141 | acacagctgt ctagtgggag gccagccttc tatattttag ccagcgttct ttcctgcggg |
| 1201 | ccaggtcatg aggagtatgc agactctaag agggagcaaa agtatctgaa ggatttaata |
| 1261 | ttttagcaag gaatagatat acaatcatcc cttggtctcc ctgggggatt ggtttcagga |
| 1321 | ccccttcttg gacaccaaat ctatggatat ttaagtccct tctataaaat ggtatagtat |
| 1381 | ttgcatataa cctatccaca tcctcctgta tactttaaat catttctaga ttacttgtaa |
| 1441 | tacctaatac aatgtaaatg ctatgcaaat agttgttatt gtttaaggaa taatgacaag |
| 1501 | aaaaaaaagt ctgtacatgc tcagtaaaga cacaaccatc cctttttttc cccagtgttt |
| 1561 | ttgatccatg gtttgctgaa tccacagatg tggagcccct ggatacggaa ggcccgctgt |
| 1621 | actttgaatg acaaataaca gatttaaaat tttcaaggca tagttttata cctga. |

[0391] Compositions of the disclosure may comprise a gRNA comprising a spacer sequence that specifically binds to a target sequence of an RNA molecule encoding CD28 protein comprising or consisting of 20 nucleotides of the sequence of

| (SEQ ID NO: 221) | |
|---|---|
| 1 | taaagtcatc aaaacaacgt tatatcctgt gtgaaatgct gcagtcagga tgccttgtgg |
| 61 | tttgagtgcc ttgatcatgt gccctaaggg gatggtggcg gtggtggtgg ccgtggatga |
| 121 | cggagactct caggccttgg caggtgcgtc tttcagttcc cctcacactt cgggttcctc |
| 181 | ggggaggagg ggctggaacc ctagcccatc gtcaggacaa agatgctcag gctgctcttg |
| 241 | gctctcaact tattcccttc aattcaagta acaggaaaca agattttggt gaagcagtcg |
| 301 | cccatgcttg tagcgtacga caatgcggtc aaccttagct gcaagtattc ctacaatctc |
| 361 | ttctcaaggg agttccgggc atcccttcac aaaggactgg atagtgctgt ggaagtctgt |
| 421 | gttgtatatg ggaattactc ccagcagctt caggtttact caaaaacggg gttcaactgt |
| 481 | gatgggaaat tgggcaatga atcagtgaca ttctacctcc agaatttgta tgttaaccaa |
| 541 | acagatattt acttctgcaa aattgaagtt atgtatcctc ctccttacct agacaatgag |
| 601 | aagagcaatg gaaccattat ccatgtgaaa gggaaacacc tttgtccaag tcccctattt |
| 661 | cccggacctt ctaagccctt ttgggtgctg gtggtggttg gtggagtcct ggcttgctat |
| 721 | agcttgctag taacagtggc ctttattatt ttctgggtga ggagtaagag gagcaggctc |
| 781 | ctgcacagtg actacatgaa catgactccc cgccgccccg ggcccacccg caagcattac |
| 841 | cagccctatg ccccaccacg cgacttcgca gcctatcgct cctgacacgg acgcctatcc |
| 901 | agaagccagc cggctggcag cccccatctg ctcaatatca ctgctctgga taggaaatga |
| 961 | ccgccatctc cagccggcca cctcaggccc ctgttgggcc accaatgcca atttttctcg |
| 1021 | agtgactaga ccaaatatca agatcatttt gagactctga aatgaagtaa aagagatttc |
| 1081 | ctgtgacagg ccaagtctta cagtgccatg gcccacattc caacttacca tgtacttagt |
| 1141 | gacttgactg agaagttagg gtagaaaaca aaaagggagt ggattctggg agcctcttcc |
| 1201 | ctttctcact cacctgcaca tctcagtcaa gcaaagtgtg gtatccacag acattttagt |
| 1261 | tgcagaagaa aggctaggaa atcattcctt ttggttaaat gggtgtttaa tcttttggtt |
| 1321 | agtgggttaa acggggtaag ttagagtagg gggagggata ggaagacata tttaaaaacc |
| 1381 | attaaaacac tgtctcccac tcatgaaatg agccacgtag ttcctattta atgctgtttt |
| 1441 | cctttagttt agaaatacat agacattgtc ttttatgaat tctgatcata tttagtcatt |
| 1501 | ttgaccaaat gagggatttg gtcaaatgag ggattccctc aaagcaatat caggtaaacc |
| 1561 | aagttgcttt cctcactccc tgtcatgaga cttcagtgtt aatgttcaca atatactttc |
| 1621 | gaaagaataa aatagttctc ctacatgaag aaagaatatg tcaggaaata aggtcacttt |
| 1681 | atgtcaaaat tatttgagta ctatgggacc tggcgcagtg gctcatgctt gtaatcccag |
| 1741 | cactttggga ggccgaggtg ggcagatcac ttgagatcag gaccagcctg gtcaagatgg |
| 1801 | tgaaactccg tctgtactaa aaatacaaaa tttagcttgg cctggtggca ggcacctgta |
| 1861 | atcccagctg cccaagaggc tgaggcatga gaatcgcttg aacctggcag gcggaggttg |
| 1921 | cagtgagccg agatagtgcc acagctctcc agcctgggcg acagagtgag actccatctc |
| 1981 | aaacaacaac aacaacaaca acaacaacaa caaaccacaa aattatttga gtactgtgaa |
| 2041 | ggattatttg tctaacagtt cattccaatc agaccaggta ggagctttcc tgtttcatat |
| 2101 | gtttcagggt tgcacagttg gtctctttaa tgtcggtgtg gagatccaaa gtgggttgtg |
| 2161 | gaaagagcgt ccataggaga agtgagaata ctgtgaaaaa gggatgttag cattcattag |
| 2221 | agtatgagga tgagtcccaa gaaggttctt tggaaggagg acgaatagaa tggagtaatg |
| 2281 | aaattcttgc catgtgctga ggagatagcc agcattaggt gacaatcttc cagaagtggt |
| 2341 | caggcagaag gtgccctggt gagagctcct ttacagggac tttatgtggt ttagggctca |
| 2401 | gagctccaaa actctgggct cagctgctcc tgtaccttgg aggtccattc acatgggaaa |
| 2461 | gtattttgga atgtgtcttt tgaagagagc atcagagttc ttaagggact gggtaaggcc |
| 2521 | tgaccctgaa atgaccatgg atatttttct acctacagtt tgagtcaact agaatatgcc |
| 2581 | tggggacctt gaagaatggc ccttcagtgg ccctcaccat ttgttcatgc ttcagttaat |
| 2641 | tcaggtgttg aaggagctta ggttttagag gcacgtagac ttggttcaag tctcgttagt |
| 2701 | agttgaatag cctcaggcaa gtcactgccc acctaagatg atggttcttc aactataaaa |
| 2761 | tggagataat ggttacaaat gtctcttcct atagtataat ctccataagg gcatggccca |
| 2821 | agtctgtctt tgactctgcc tatccctgac atttagtagc atgcccgaca tacaatgtta |
| 2881 | gctattggta ttattgccat atagataaat tatgtataaa aattaaactg ggcaatagcc |
| 2941 | taagaagggg ggaatattgt aacacaaatt taaacccact acgcagggat gaggtgctat |
| 3001 | aatatgagga ccttttaact tccatcattt tcctgtttct tgaaatagtt tatcttgtaa |
| 3061 | tgaaatataa ggcacctccc acttttatgt atagaaagag gtcttttaat ttttttttaa |
| 3121 | tgtgagaagg aagggaggag taggaatctt gagattccag atcgaaaata ctgtactttg |
| 3181 | gttgattttt aagtgggctt ccattccatg gatttaatca gtcccaagaa gatcaaactc |
| 3241 | agcagtactt gggtgctgaa gaactgttgg atttaccctg gcacgtgtgc cacttgccag |
| 3301 | cttcttgggc acacagagtt cttcaatcca agttatcaga ttgtatttga aaatgacaga |
| 3361 | gctggagagt tttttgaaat ggcagtggca aataaataaa tacttttttt taaatggaaa |
| 3421 | gacttgatct atggtaataa atgattttgt tttctgactg gaaaaatagg cctactaaag |
| 3481 | atgaatcaca cttgagatgt ttcttactca ctctgcacag aaacaaagaa gaaatgttat |
| 3541 | acagggaagt ccgttttcac tattagtatg aaccaagaaa tggttcaaaa acagtggtag |
| 3601 | gagcaatgct ttcatagttt cagatatggt agttatgaag aaaacaatgt catttgctgc |
| 3661 | tattattgta agagtcttat aattaatggt actcctataa tttttgattg tgagctcacc |
| 3721 | tatttgggtt aagcatgcca atttaaagag accaagtgta tgtacattat gttctacata |
| 3781 | ttcagtgata aaattactaa actactatat gtctgcttta aatttgtact ttaatattgt |
| 3841 | cttttggtat taagaaagat atgctttcag aatagatatg cttcgctttg gcaaggaatt |
| 3901 | tggatagaac ttgctattta aaagaggtgt ggggtaaatc cttgtataaa tctccagttt |
| 3961 | agcctttttt gaaaaagcta gactttcaaa tactaatttc acttcaagca gggtacgttt |
| 4021 | ctggtttgtt tgcttgactt cagtcacaat ttcttatcag accaatggct gacctctttg |
| 4081 | agatgtcagg ctaggcttac ctatgtgttc tgtgtcatgt gaatgctgag aagtttgaca |
| 4141 | gagatccaac ttcagccttg accccatcag tccctcgggt taactaactg agccaccggt |
| 4201 | cctcatggct attttaatga gggtattgat ggttaaatgc atgtctgatc ccttatccca |
| 4261 | gccatttgca ctgccagctg ggaactatac cagacctgga tactgatccc aaagtgttaa |
| 4321 | attcaactac atgctggaga ttagagatgg tgccaataaa ggacccagaa ccaggatctt |
| 4381 | gattgctata gacttattaa taatccaggt caaagagagt gacacacact ctctcaagac |
| 4441 | ctggggtgag ggagtctgtg ttatctgcaa ggccatttga ggctcagaaa gtctctcttt |
| 4501 | cctatagata tatgcatact ttctgacata taggaatgta tcaggaatac tcaaccatca |
| 4561 | caggcatgtt cctacctcag ggcctttaca tgtcctgttt actctgtcta gaatgtcctt |
| 4621 | ctgtagatga cctggcttgc ctcgtcaccc ttcaggtcct tgctcaagtg tcatcttctc |
| 4681 | ccctagttaa actaccccac accctgtctg ctttccttgc ttatttttct ccatagcatt |
| 4741 | ttaccatctc ttacattaga catttttctt atttatttgt agtttataag cttcatgagg |
| 4801 | caagtaactt tgctttgttt cttgctgtat ctccagtgcc cagagcagtg cctggtatat |
| 4861 | aataaatatt tattgactga gtgaaaaaaa aaaaaaaaaa. |

[0392] Compositions of the disclosure may comprise a gRNA comprising a spacer sequence that specifically binds to a target sequence of an RNA molecule encoding CD28 protein comprising or consisting of 20 nucleotides of the sequence of

| (SEQ ID NO: 222) | |
|---|---|
| 1 | taaagtcatc aaaacaacgt tatatcctgt gtgaaatgct gcagtcagga tgccttgtgg |
| 61 | tttgagtgcc ttgatcatgt gccctaaggg gatggtggcg gtggtggtgg ccgtggatga |
| 121 | cggagactct caggccttgg caggtgcgtc tttcagttcc cctcacactt cgggttcctc |
| 181 | ggggaggagg ggctggaacc ctagcccatc gtcaggacaa agatgctcag gctgctcttg |
| 241 | gctctcaact tattcccttc aattcaagta acaggaaaca agattttggt gaagcagtcg |
| 301 | cccatgcttg tagcgtacga caatgcggtc aaccttagct ggaaacacct ttgtccaagt |
| 361 | cccctatttc ccggaccttc taagcccttt tgggtgctgg tggtggttgg tggagtcctg |
| 421 | gcttgctata gcttgctagt aacagtggcc tttattattt tctgggtgag gagtaagagg |
| 481 | agcaggctcc tgcacagtga ctacatgaac atgactcccc gccgccccgg gcccacccgc |
| 541 | aagcattacc agccctatgc cccaccacgc gacttcgcag cctatcgctc ctgacacgga |
| 601 | cgcctatcca gaagccagcc ggctggcagc ccccatctgc tcaatatcac tgctctggat |
| 661 | aggaaatgac cgccatctcc agccggccac ctcaggcccc tgttgggcca ccaatgccaa |
| 721 | tttttctcga gtgactagac caaatatcaa gatcattttg agactctgaa atgaagtaaa |
| 781 | agagatttcc tgtgacaggc caagtcttac agtgccatgg cccacattcc aacttaccat |
| 841 | gtacttagtg acttgactga gaagttaggg tagaaaacaa aaagggagtg gattctggga |
| 901 | gcctcttccc tttctcactc acctgcacat ctcagtcaag caaagtgtgg tatccacaga |
| 961 | cattttagtt gcagaagaaa ggctaggaaa tcattccttt tggttaaatg ggtgtttaat |
| 1021 | cttttggtta gtgggttaaa cggggtaagt tagagtaggg ggagggatag gaagacatat |
| 1081 | ttaaaaacca ttaaaacact gtctcccact catgaaatga gccacgtagt tcctatttaa |
| 1141 | tgctgttttc ctttagttta gaaatacata gacattgtct tttatgaatt ctgatcatat |
| 1201 | ttagtcattt tgaccaaatg agggatttgg tcaaatgagg gattccctca aagcaatatc |
| 1261 | aggtaaacca agttgctttc ctcactccct gtcatgagac ttcagtgtta atgttcacaa |
| 1321 | tatactttcg aaagaataaa atagttctcc tacatgaaga aagaatatgt caggaaataa |
| 1381 | ggtcacttta tgtcaaaatt atttgagtac tatgggacct ggcgcagtgg ctcatgcttg |
| 1441 | taatcccagc actttgggag gccgaggtgg gcagatcact tgagatcagg accagcctgg |
| 1501 | tcaagatggt gaaactccgt ctgtactaaa aatacaaaat ttagcttggc ctggtggcag |
| 1561 | gcacctgtaa tcccagctgc ccaagaggct gaggcatgag aatcgcttga acctggcagg |
| 1621 | cggaggttgc agtgagccga gatagtgcca cagctctcca gcctgggcga cagagtgaga |
| 1681 | ctccatctca aacaacaaca acaacaacaa caacaacaac aaaccacaaa attatttgag |
| 1741 | tactgtgaag gattatttgt ctaacagttc attccaatca gaccaggtag gagctttcct |
| 1801 | gtttcatatg tttcagggtt gcacagttgg tctctttaat gtcggtgtgg agatccaaag |
| 1861 | tgggttgtgg aaagagcgtc cataggagaa gtgagaatac tgtgaaaaag ggatgttagc |
| 1921 | attcattaga gtatgaggat gagtcccaag aaggttcttt ggaaggagga cgaatagaat |
| 1981 | ggagtaatga aattcttgcc atgtgctgag gagatagcca gcattaggtg acaatcttcc |
| 2041 | agaagtggtc aggcagaagg tgccctggtg agagctcctt tacagggact ttatgtggtt |
| 2101 | tagggctcag agctccaaaa ctctgggctc agctgctcct gtaccttgga ggtccattca |
| 2161 | catgggaaag tattttggaa tgtgtctttt gaagagagca tcagagttct taagggactg |
| 2221 | ggtaaggcct gaccctgaaa tgaccatgga tatttttcta cctacagttt gagtcaacta |
| 2281 | gaatatgcct ggggaccttg aagaatggcc cttcagtggc cctcaccatt tgttcatgct |
| 2341 | tcagttaatt caggtgttga aggagcttag gttttagagg cacgtagact tggttcaagt |
| 2401 | ctcgttagta gttgaatagc ctcaggcaag tcactgccca cctaagatga tggttcttca |
| 2461 | actataaaat ggagataatg gttacaaatg tctcttccta tagtataatc tccataaggg |
| 2521 | catggcccaa gtctgtcttt gactctgcct atccctgaca tttagtagca tgcccgacat |
| 2581 | acaatgttag ctattggtat tattgccata tagataaatt atgtataaaa attaaactgg |
| 2641 | gcaatagcct aagaaggggg gaatattgta acacaaattt aaacccacta cgcagggatg |
| 2701 | aggtgctata atatgaggac cttttaactt ccatcatttt cctgtttctt gaaatagttt |
| 2761 | atcttgtaat gaaatataag gcacctccca cttttatgta tagaaagagg tcttttaatt |
| 2821 | tttttttaat gtgagaagga agggaggagt aggaatcttg agattccaga tcgaaaatac |
| 2881 | tgtactttgg ttgattttta agtgggcttc cattccatgg atttaatcag tcccaagaag |
| 2941 | atcaaactca gcagtacttg ggtgctgaag aactgttgga tttaccctgg cacgtgtgcc |
| 3001 | acttgccagc ttcttgggca cacagagttc ttcaatccaa gttatcagat tgtatttgaa |
| 3061 | aatgacagag ctggagagtt ttttgaaatg gcagtggcaa ataaataaat actttttttt |
| 3121 | aaatggaaag acttgatcta tggtaataaa tgattttgtt ttctgactgg aaaaataggc |
| 3181 | ctactaaaga tgaatcacac ttgagatgtt tcttactcac tctgcacaga aacaaagaag |
| 3241 | aaatgttata cagggaagtc cgttttcact attagtatga accaagaaat ggttcaaaaa |
| 3301 | cagtggtagg agcaatgctt tcatagtttc agatatggta gttatgaaga aaacaatgtc |
| 3361 | atttgctgct attattgtaa gagtcttata attaatggta ctcctataat ttttgattgt |
| 3421 | gagctcacct atttgggtta agcatgccaa tttaaagaga ccaagtgtat gtacattatg |
| 3481 | ttctacatat tcagtgataa aattactaaa ctactatatg tctgctttaa atttgtactt |
| 3541 | taatattgtc ttttggtatt aagaaagata tgctttcaga atagatatgc ttcgctttgg |
| 3601 | caaggaattt ggatagaact tgctatttaa aagaggtgtg gggtaaatcc ttgtataaat |
| 3661 | ctccagttta gccttttttg aaaaagctag actttcaaat actaatttca cttcaagcag |
| 3721 | ggtacgtttc tggtttgttt gcttgacttc agtcacaatt tcttatcaga ccaatggctg |
| 3781 | acctctttga gatgtcaggc taggcttacc tatgtgttct gtgtcatgtg aatgctgaga |
| 3841 | agtttgacag agatccaact tcagccttga ccccatcagt ccctcgggtt aactaactga |
| 3901 | gccaccggtc ctcatggcta ttttaatgag ggtattgatg gttaaatgca tgtctgatcc |
| 3961 | cttatcccag ccatttgcac tgccagctgg gaactatacc agacctggat actgatccca |
| 4021 | aagtgttaaa ttcaactaca tgctggagat tagagatggt gccaataaag gacccagaac |
| 4081 | caggatcttg attgctatag acttattaat aatccaggtc aaagagagtg acacacactc |
| 4141 | tctcaagacc tggggtgagg gagtctgtgt tatctgcaag gccatttgag gctcagaaag |
| 4201 | tctctctttc ctatagatat atgcatactt tctgacatat aggaatgtat caggaatact |
| 4261 | caaccatcac aggcatgttc ctacctcagg gcctttacat gtcctgttta ctctgtctag |
| 4321 | aatgtccttc tgtagatgac ctggcttgcc tcgtcaccct tcaggtcctt gctcaagtgt |
| 4381 | catcttctcc cctagttaaa ctaccccaca ccctgtctgc tttccttgct tatttttctc |
| 4441 | catagcattt taccatctct tacattagac atttttctta tttatttgta gtttataagc |
| 4501 | ttcatgaggc aagtaacttt gctttgtttc ttgctgtatc tccagtgccc agagcagtgc |
| 4561 | ctggtatata ataaatattt attgactgag tgaaaaaaaa aaaaaaaaa. |

[0393] Compositions of the disclosure may comprise a gRNA comprising a spacer sequence that specifically binds to a target sequence of an RNA molecule encoding CD28 protein comprising or consisting of 20 nucleotides of the sequence of

| (SEQ ID NO: 223) | |
|---|---|
| 1 | taaagtcatc aaaacaacgt tatatcctgt gtgaaatgct gcagtcagga tgccttgtgg |
| 61 | tttgagtgcc ttgatcatgt gccctaaggg gatggtggcg gtggtggtgg ccgtggatga |
| 121 | cggagactct caggccttgg caggtgcgtc tttcagttcc cctcacactt cgggttcctc |
| 181 | ggggaggagg ggctggaacc ctagcccatc gtcaggacaa agatgctcag gctgctcttg |
| 241 | gctctcaact tattcccttc aattcaagta acagggaaac acctttgtcc aagtccccta |
| 301 | tttcccggac cttctaagcc cttttgggtg ctggtggtgg ttggtggagt cctggcttgc |
| 361 | tatagcttgc tagtaacagt ggcctttatt attttctggg tgaggagtaa gaggagcagg |
| 421 | ctcctgcaca gtgactacat gaacatgact ccccgccgcc ccgggcccac ccgcaagcat |
| 481 | taccagccct atgccccacc acgcgacttc gcagcctatc gctcctgaca cggacgccta |
| 541 | tccagaagcc agccggctgg cagcccccat ctgctcaata tcactgctct ggataggaaa |
| 601 | tgaccgccat ctccagccgg ccacctcagg cccctgttgg gccaccaatg ccaatttttc |
| 661 | tcgagtgact agaccaaata tcaagatcat tttgagactc tgaaatgaag taaaagagat |
| 721 | ttcctgtgac aggccaagtc ttacagtgcc atggcccaca ttccaactta ccatgtactt |
| 781 | agtgacttga ctgagaagtt agggtagaaa acaaaaaggg agtggattct gggagcctct |
| 841 | tccctttctc actcacctgc acatctcagt caagcaaagt gtggtatcca cagacatttt |
| 901 | agttgcagaa gaaaggctag gaaatcattc cttttggtta aatgggtgtt taatcttttg |
| 961 | gttagtgggt taaacggggt aagttagagt agggggaggg ataggaagac atatttaaaa |
| 1021 | accattaaaa cactgtctcc cactcatgaa atgagccacg tagttcctat ttaatgctgt |
| 1081 | tttcctttag tttagaaata catagacatt gtcttttatg aattctgatc atatttagtc |
| 1141 | attttgacca aatgagggat ttggtcaaat gagggattcc ctcaaagcaa tatcaggtaa |
| 1201 | accaagttgc tttcctcact ccctgtcatg agacttcagt gttaatgttc acaatatact |
| 1261 | ttcgaaagaa taaaatagtt ctcctacatg aagaaagaat atgtcaggaa ataaggtcac |
| 1321 | tttatgtcaa aattatttga gtactatggg acctggcgca gtggctcatg cttgtaatcc |
| 1381 | cagcactttg ggaggccgag gtgggcagat cacttgagat caggaccagc ctggtcaaga |
| 1441 | tggtgaaact ccgtctgtac taaaaataca aaatttagct tggcctggtg gcaggcacct |
| 1501 | gtaatcccag ctgcccaaga ggctgaggca tgagaatcgc ttgaacctgg caggcggagg |
| 1561 | ttgcagtgag ccgagatagt gccacagctc tccagcctgg gcgacagagt gagactccat |
| 1621 | ctcaaacaac aacaacaaca acaacaacaa caacaaacca caaaattatt tgagtactgt |
| 1681 | gaaggattat ttgtctaaca gttcattcca atcagaccag gtaggagctt tcctgtttca |
| 1741 | tatgtttcag ggttgcacag ttggtctctt taatgtcggt gtggagatcc aaagtgggtt |
| 1801 | gtggaaagag cgtccatagg agaagtgaga atactgtgaa aaagggatgt tagcattcat |
| 1861 | tagagtatga ggatgagtcc caagaaggtt ctttggaagg aggacgaata gaatggagta |
| 1921 | atgaaattct tgccatgtgc tgaggagata gccagcatta ggtgacaatc ttccagaagt |
| 1981 | ggtcaggcag aaggtgccct ggtgagagct cctttacagg gactttatgt ggtttagggc |
| 2041 | tcagagctcc aaaactctgg gctcagctgc tcctgtacct tggaggtcca ttcacatggg |
| 2101 | aaagtatttt ggaatgtgtc ttttgaagag agcatcagag ttcttaaggg actgggtaag |
| 2161 | gcctgaccct gaaatgacca tggatatttt tctacctaca gtttgagtca actagaatat |
| 2221 | gcctggggac cttgaagaat ggcccttcag tggccctcac catttgttca tgcttcagtt |
| 2281 | aattcaggtg ttgaaggagc ttaggtttta gaggcacgta gacttggttc aagtctcgtt |
| 2341 | agtagttgaa tagcctcagg caagtcactg cccacctaag atgatggttc ttcaactata |
| 2401 | aaatggagat aatggttaca aatgtctctt cctatagtat aatctccata agggcatggc |
| 2461 | ccaagtctgt ctttgactct gcctatccct gacatttagt agcatgcccg acatacaatg |
| 2521 | ttagctattg gtattattgc catatagata aattatgtat aaaaattaaa ctgggcaata |
| 2581 | gcctaagaag gggggaatat tgtaacacaa atttaaaccc actacgcagg gatgaggtgc |
| 2641 | tataatatga ggacctttta acttccatca ttttcctgtt tcttgaaata gtttatcttg |
| 2701 | taatgaaata taaggcacct cccactttta tgtatagaaa gaggtctttt aatttttttt |
| 2761 | taatgtgaga aggaagggag gagtaggaat cttgagattc cagatcgaaa atactgtact |
| 2821 | ttggttgatt tttaagtggg cttccattcc atggatttaa tcagtcccaa gaagatcaaa |
| 2881 | ctcagcagta cttgggtgct gaagaactgt tggatttacc ctggcacgtg tgccacttgc |
| 2941 | cagcttcttg ggcacacaga gttcttcaat ccaagttatc agattgtatt tgaaaatgac |
| 3001 | agagctggag agttttttga aatggcagtg gcaaataaat aaatactttt ttttaaatgg |
| 3061 | aaagacttga tctatggtaa taaatgattt tgttttctga ctggaaaaat aggcctacta |
| 3121 | aagatgaatc acacttgaga tgtttcttac tcactctgca cagaaacaaa gaagaaatgt |
| 3181 | tatacaggga agtccgtttt cactattagt atgaaccaag aaatggttca aaaacagtgg |
| 3241 | taggagcaat gctttcatag tttcagatat ggtagttatg aagaaaacaa tgtcatttgc |
| 3301 | tgctattatt gtaagagtct tataattaat ggtactccta taatttttga ttgtgagctc |
| 3361 | acctatttgg gttaagcatg ccaatttaaa gagaccaagt gtatgtacat tatgttctac |
| 3421 | atattcagtg ataaaattac taaactacta tatgtctgct ttaaatttgt actttaatat |
| 3481 | tgtcttttgg tattaagaaa gatatgcttt cagaatagat atgcttcgct ttggcaagga |
| 3541 | atttggatag aacttgctat ttaaaagagg tgtggggtaa atccttgtat aaatctccag |
| 3601 | tttagccttt tttgaaaaag ctagactttc aaatactaat ttcacttcaa gcagggtacg |
| 3661 | tttctggttt gtttgcttga cttcagtcac aatttcttat cagaccaatg gctgacctct |
| 3721 | ttgagatgtc aggctaggct tacctatgtg ttctgtgtca tgtgaatgct gagaagtttg |
| 3781 | acagagatcc aacttcagcc ttgaccccat cagtccctcg ggttaactaa ctgagccacc |
| 3841 | ggtcctcatg gctattttaa tgagggtatt gatggttaaa tgcatgtctg atcccttatc |
| 3901 | ccagccattt gcactgccag ctgggaacta taccagacct ggatactgat cccaaagtgt |
| 3961 | taaattcaac tacatgctgg agattagaga tggtgccaat aaaggaccca gaaccaggat |
| 4021 | cttgattgct atagacttat taataatcca ggtcaaagag agtgacacac actctctcaa |
| 4081 | gacctggggt gagggagtct gtgttatctg caaggccatt tgaggctcag aaagtctctc |
| 4141 | tttcctatag atatatgcat actttctgac atataggaat gtatcaggaa tactcaacca |
| 4201 | tcacaggcat gttcctacct cagggccttt acatgtcctg tttactctgt ctagaatgtc |
| 4261 | cttctgtaga tgacctggct tgcctcgtca cccttcaggt ccttgctcaa gtgtcatctt |
| 4321 | ctcccctagt taaactaccc cacaccctgt ctgctttcct tgcttatttt tctccatagc |
| 4381 | attttaccat ctcttacatt agacattttt cttatttatt tgtagtttat aagcttcatg |
| 4441 | aggcaagtaa ctttgctttg tttcttgctg tatctccagt gcccagagca gtgcctggta |
| 4501 | tataataaat atttattgac tgagtgaaaa aaaaaaaaaa aaa. |

[0394] Compositions of the disclosure may comprise a gRNA comprising a spacer sequence that specifically binds to a target sequence of an RNA molecule encoding CD80 protein comprising or consisting of 20 nucleotides of the sequence of

| (SEQ ID NO: 224) | |
|---|---|
| 1 | gacaagtact gagtgaactc aaaccctctg taaagtaaca gaagttagaa ggggaaatgt |
| 61 | cgcctctctg aagattaccc aaagaaaaag tgatttgtca ttgctttata gactgtaaga |
| 121 | agagaacatc tcagaagtgg agtcttaccc tgaaatcaaa ggatttaaag aaaaagtgga |
| 181 | atttttcttc agcaagctgt gaaactaaat ccacaacctt tggagaccca ggaacaccct |
| 241 | ccaatctctg tgtgttttgt aaacatcact ggagggtctt ctacgtgagc aattggattg |
| 301 | tcatcagccc tgcctgtttt gcacctggga agtgccctgg tcttacttgg gtccaaattg |
| 361 | ttggctttca cttttgaccc taagcatctg aagccatggg ccacacacgg aggcagggaa |
| 421 | catcaccatc caagtgtcca tacctcaatt tctttcagct cttggtgctg gctggtcttt |
| 481 | ctcacttctg ttcaggtgtt atccacgtga ccaaggaagt gaaagaagtg gcaacgctgt |
| 541 | cctgtggtca caatgtttct gttgaagagc tggcacaaac tcgcatctac tggcaaaagg |
| 601 | agaagaaaat ggtgctgact atgatgtctg gggacatgaa tatatggccc gagtacaaga |
| 661 | accggaccat ctttgatatc actaataacc tctccattgt gatcctggct ctgcgcccat |
| 721 | ctgacgaggg cacatacgag tgtgttgttc tgaagtatga aaaagacgct ttcaagcggg |
| 781 | aacacctggc tgaagtgacg ttatcagtca aagctgactt ccctacacct agtatatctg |
| 841 | actttgaaat tccaacttct aatattagaa ggataatttg ctcaacctct ggaggttttc |
| 901 | cagagcctca cctctcctgg ttggaaaatg gagaagaatt aaatgccatc aacacaacag |
| 961 | tttcccaaga tcctgaaact gagctctatg ctgttagcag caaactggat ttcaatatga |
| 1021 | caaccaacca cagcttcatg tgtctcatca agtatggaca tttaagagtg aatcagacct |
| 1081 | tcaactggaa tacaaccaag caagagcatt ttcctgataa cctgctccca tcctgggcca |
| 1141 | ttaccttaat ctcagtaaat ggaatttttg tgatatgctg cctgacctac tgctttgccc |
| 1201 | caagatgcag agagagaagg aggaatgaga gattgagaag ggaaagtgta cgccctgtat |
| 1261 | aacagtgtcc gcagaagcaa ggggctgaaa agatctgaag gtcccacctc catttgcaat |
| 1321 | tgacctcttc tgggaacttc ctcagatgga caagattacc ccaccttgcc ctttacgtat |
| 1381 | ctgctcttag gtgcttcttc acttcagttg ctttgcagga agtgtctaga ggaatatggt |
| 1441 | gggcacagaa gtagctctgg tgaccttgat caaggtgttt tgaaatgcag aattcttgag |
| 1501 | ttctggaagg gactttagag aataccagtg ttattaatga caaaggcact gaggcccagg |
| 1561 | gaggtgaccc gaattataaa ggccagcgcc agaacccaga tttcctaact ctggtgctct |
| 1621 | ttccctttat cagtttgact gtggcctgtt aactggtata tacatatata tgtcaggcaa |
| 1681 | agtgctgctg gaagtagaat ttgtccaata acaggtcaac ttcagagact atctgatttc |
| 1741 | ctaatgtcag agtagaagat tttatgctgc tgtttacaaa agcccaatgt aatgcatagg |
| 1801 | aagtatggca tgaacatctt taggagacta atggaaatat tattggtgtt tacccagtat |
| 1861 | tccatttttt tcattgtgtt ctctattgct gctctctcac tcccccatga ggtacagcag |
| 1921 | aaaggagaac tatccaaaac taatttcctc tgacatgtaa gacgaatgat ttaggtacgt |
| 1981 | caaagcagta gtcaaggagg aaagggatag tccaaagact taactggttc atattggact |
| 2041 | gataatctct ttaaatggct ttatgctagt ttgacctcat ttgtaaaata tttatgagaa |
| 2101 | agttctcatt taaaatgaga tcgttgttta cagtgtatgt actaagcagt aagctatctt |
| 2161 | caaatgtcta aggtagtaac tttccatagg gcctccttag atccctaaga tggctttttc |
| 2221 | tccttggtat ttctgggtct ttctgacatc agcagagaac tggaaagaca tagccaactg |
| 2281 | ctgttcatgt tactcatgac tcctttctct aaaactgcct tccacaattc actagaccag |
| 2341 | aagtggacgc aacttaagct gggataatca cattatcatc tgaaaatctg gagttgaaca |
| 2401 | gcaaaagaag acaacatttc tcaaatgcac atctcatggc agctaagcca catggctggg |
| 2461 | atttaaagcc tttagagcca gcccatggct ttagctacct cactatgctg cttcacaaac |
| 2521 | cttgctcctg tgtaaaacta tattctcagt gtagggcaga gaggtctaac accaacataa |
| 2581 | ggtactagca gtgtttcccg tattgacagg aatacttaac tcaataattc ttttcttttc |
| 2641 | catttagtaa cagttgtgat gactatgttt ctattctaag taattcctgt attctacagc |
| 2701 | agatactttg tcagcaatac taagggaaga aacaaagttg aaccgtttct ttaataa |

[0395] Exemplary gRNA spacer sequences of the disclosure that specifically bind to a target sequence of an RNA molecule encoding a CD80 protein of the disclosure may comprise or consist of a nucleic acid having a sequence selected from any one of comprising SEQ ID NO: 330 to SEQ ID NO: 3067.

[0396] Compositions of the disclosure may comprise a gRNA comprising a spacer sequence that specifically binds to a target sequence of an RNA molecule encoding CD86 protein comprising or consisting of 20 nucleotides of the sequence of:

| (SEQ ID NO: 226) | |
|---|---|
| 1 | agtcattgcc gaggaaggct tgcacagggt gaaagctttg cttctctgct gctgtaacag |
| 61 | ggactagcac agacacacgg atgagtgggg tcatttccag atattaggtc acagcagaag |
| 121 | cagccaaaat ggatccccag tgcactatgg gactgagtaa cattctcttt gtgatggcct |
| 181 | tcctgctctc tggtgctgct cctctgaaga ttcaagctta tttcaatgag actgcagacc |
| 241 | tgccatgcca atttgcaaac tctcaaaacc aaagcctgag tgagctagta gtattttggc |
| 301 | aggaccagga aaacttggtt ctgaatgagg tatacttagg caaagagaaa tttgacagtg |
| 361 | ttcattccaa gtatatgggc cgcacaagtt ttgattcgga cagttggacc ctgagacttc |
| 421 | acaatcttca gatcaaggac aagggcttgt atcaatgtat catccatcac aaaaagccca |
| 481 | caggaatgat tcgcatccac cagatgaatt ctgaactgtc agtgcttgct aacttcagtc |
| 541 | aacctgaaat agtaccaatt tctaatataa cagaaaatgt gtacataaat ttgacctgct |
| 601 | catctataca cggttaccca gaacctaaga agatgagtgt tttgctaaga accaagaatt |
| 661 | caactatcga gtatgatggt attatgcaga aatctcaaga taatgtcaca gaactgtacg |
| 721 | acgtttccat cagcttgtct gtttcattcc ctgatgttac gagcaatatg accatcttct |
| 781 | gtattctgga aactgacaag acgcggcttt tatcttcacc tttctctata gagcttgagg |
| 841 | accctcagcc tcccccagac cacattcctt ggattacagc tgtacttcca acagttatta |
| 901 | tatgtgtgat ggttttctgt ctaattctat ggaaatggaa gaagaagaag cggcctcgca |
| 961 | actcttataa atgtggaacc aacacaatgg agagggaaga gagtgaacag accaagaaaa |
| 1021 | gagaaaaaat ccatatacct gaaagatctg atgaagccca gcgtgttttt aaaagttcga |
| 1081 | agacatcttc atgcgacaaa agtgatacat gtttttaatt aaagagtaaa gcccatacaa |
| 1141 | gtattcattt tttctaccct ttcctttgta agttcctggg caaccttttt gatttcttcc |
| 1201 | agaaggcaaa aagacattac catgagtaat aagggggctc caggactccc tctaagtgga |
| 1261 | atagcctccc tgtaactcca gctctgctcc gtatgccaag aggagacttt aattctctta |
| 1321 | ctgcttcttt tcacttcaga gcacacttat gggccaagcc cagcttaatg gctcatgacc |
| 1381 | tggaaataaa atttaggacc aatacctcct ccagatcaga ttcttctctt aatttcatag |
| 1441 | attgtgtttt ttttttaaat agacctctca atttctggaa aactgccttt tatctgccca |
| 1501 | gaattctaag ctggtgcccc actgaatttt gtgtacctgt gactaaacaa ctacctcctc |
| 1561 | agtctgggtg ggacttatgt atttatgacc ttatagtgtt aatatcttga aacatagaga |
| 1621 | tctatgtact gtaatagtgt gattactatg ctctagagaa aagtctaccc ctgctaagga |
| 1681 | gttctcatcc ctctgtcagg gtcagtaagg aaaacggtgg cctagggtac aggcaacaat |
| 1741 | gagcagacca acctaaattt ggggaaatta ggagaggcag agatagaacc tggagccact |
| 1801 | tctatctggg ctgttgctaa tattgaggag gcttgcccca cccaacaagc catagtggag |
| 1861 | agaactgaat aaacaggaaa atgccagagc ttgtgaaccc tgtttctctt gaagaactga |
| 1921 | ctagtgagat ggcctgggga agctgtgaaa gaaccaaaag agatcacaat actcaaaaga |
| 1981 | gagagagaga gaaaaaagag agatcttgat ccacagaaat acatgaaatg tctggtctgt |
| 2041 | ccaccccatc aacaagtctt gaaacaagca acagatggat agtctgtcca aatggacata |
| 2101 | agacagacag cagtttccct ggtggtcagg gaggggtttt ggtgataccc aagttattgg |
| 2161 | gatgtcatct tcctggaagc agagctgggg agggagagcc atcaccttga taatgggatg |
| 2221 | aatggaagga ggcttaggac tttccactcc tggctgagag aggaagagct gcaacggaat |
| 2281 | taggaagacc aagacacaga tcacccgggg cttacttagc ctacagatgt cctacgggaa |
| 2341 | cgtgggctgg cccagcatag ggctagcaaa tttgagttgg atgattgttt ttgctcaagg |
| 2401 | caaccagagg aaacttgcat acagagacag atatactggg agaaatgact ttgaaaacct |
| 2461 | ggctctaagg tgggatcact aagggatggg gcagtctctg cccaaacata aagagaactc |
| 2521 | tggggagcct gagccacaaa aatgttcctt tattttatgt aaaccctcaa gggttataga |
| 2581 | ctgccatgct agacaagctt gtccatgtaa tattcccatg tttttaccct gcccctgcct |
| 2641 | tgattagact cctagcacct ggctagtttc taacatgttt tgtgcagcac agtttttaat |
| 2701 | aaatgcttgt tacattcatt taaaaaaaaa aaaaa. |

[0397] Exemplary gRNA spacer sequences of the disclosure that specifically bind to a target sequence of an RNA molecule encoding a CD86 protein of the disclosure may comprise or consist of a nucleic acid having a sequence selected from any one of SEQ ID NO: 3068 to SEQ ID NO: 5783.

[0398] Compositions of the disclosure may comprise a gRNA comprising a spacer sequence that specifically binds to a target sequence of an RNA molecule encoding CD86 protein comprising or consisting of 20 nucleotides of the sequence of

| (SEQ ID NO: 227) | |
|---|---|
| 1 | ccctttctgt atttgagttc taccgtcagt cctggcatta tttctctctc tacaaggagc |
| 61 | cttaggaggt acggggagct cgcaaatact ccttttggtt tattcttacc accttgcttc |
| 121 | tgtgttcctt gggaatgctg ctgtgcttat gcatctggtc tctttttgga gctacagtgg |
| 181 | acaggcattt gtgacagcac tatgggactg agtaacattc tctttgtgat ggccttcctg |
| 241 | ctctctggtg ctgctcctct gaagattcaa gcttatttca atgagactgc agacctgcca |
| 301 | tgccaatttg caaactctca aaaccaaagc ctgagtgagc tagtagtatt ttggcaggac |
| 361 | caggaaaact tggttctgaa tgaggtatac ttaggcaaag agaaatttga cagtgttcat |
| 421 | tccaagtata tgggccgcac aagttttgat tcggacagtt ggaccctgag acttcacaat |
| 481 | cttcagatca aggacaaggg cttgtatcaa tgtatcatcc atcacaaaaa gcccacagga |
| 541 | atgattcgca tccaccagat gaattctgaa ctgtcagtgc ttgctaactt cagtcaacct |
| 601 | gaaatagtac caatttctaa tataacagaa aatgtgtaca taaatttgac ctgctcatct |
| 661 | atacacggtt acccagaacc taagaagatg agtgttttgc taagaaccaa gaattcaact |
| 721 | atcgagtatg atggtattat gcagaaatct caagataatg tcacagaact gtacgacgtt |
| 781 | tccatcagct tgtctgtttc attccctgat gttacgagca atatgaccat cttctgtatt |
| 841 | ctggaaactg acaagacgcg gcttttatct tcacctttct ctatagagct tgaggaccct |
| 901 | cagcctcccc cagaccacat tccttggatt acagctgtac ttccaacagt tattatatgt |
| 961 | gtgatggttt tctgtctaat tctatggaaa tggaagaaga agaagcggcc tcgcaactct |
| 1021 | tataaatgtg gaaccaacac aatggagagg gaagagagtg aacagaccaa gaaaagagaa |
| 1081 | aaaatccata tacctgaaag atctgatgaa gcccagcgtg tttttaaaag ttcgaagaca |
| 1141 | tcttcatgcg acaaaagtga tacatgtttt taattaaaga gtaaagccca tacaagtatt |
| 1201 | cattttttct accctttcct ttgtaagttc ctgggcaacc tttttgattt cttccagaag |
| 1261 | gcaaaaagac attaccatga gtaataaggg ggctccagga ctccctctaa gtggaatagc |
| 1321 | ctccctgtaa ctccagctct gctccgtatg ccaagaggag actttaattc tcttactgct |
| 1381 | tcttttcact tcagagcaca cttatgggcc aagcccagct taatggctca tgacctggaa |
| 1441 | ataaaattta ggaccaatac ctcctccaga tcagattctt ctcttaattt catagattgt |
| 1501 | gttttttttt taaatagacc tctcaatttc tggaaaactg ccttttatct gcccagaatt |
| 1561 | ctaagctggt gccccactga attttgtgta cctgtgacta aacaactacc tcctcagtct |
| 1621 | gggtgggact tatgtattta tgaccttata gtgttaatat cttgaaacat agagatctat |
| 1681 | gtactgtaat agtgtgatta ctatgctcta gagaaaagtc tacccctgct aaggagttct |
| 1741 | catccctctg tcagggtcag taaggaaaac ggtggcctag ggtacaggca acaatgagca |
| 1801 | gaccaaccta aatttgggga aattaggaga ggcagagata gaacctggag ccacttctat |
| 1861 | ctgggctgtt gctaatattg aggaggcttg ccccacccaa caagccatag tggagagaac |
| 1921 | tgaataaaca ggaaaatgcc agagcttgtg aaccctgttt ctcttgaaga actgactagt |
| 1981 | gagatggcct ggggaagctg tgaaagaacc aaaagagatc acaatactca aaagagagag |
| 2041 | agagagaaaa aagagagatc ttgatccaca gaaatacatg aaatgtctgg tctgtccacc |
| 2101 | ccatcaacaa gtcttgaaac aagcaacaga tggatagtct gtccaaatgg acataagaca |
| 2161 | gacagcagtt tccctggtgg tcagggaggg gttttggtga tacccaagtt attgggatgt |
| 2221 | catcttcctg gaagcagagc tggggaggga gagccatcac cttgataatg ggatgaatgg |
| 2281 | aaggaggctt aggactttcc actcctggct gagagaggaa gagctgcaac ggaattagga |
| 2341 | agaccaagac acagatcacc cggggcttac ttagcctaca gatgtcctac gggaacgtgg |
| 2401 | gctggcccag catagggcta gcaaatttga gttggatgat tgtttttgct caaggcaacc |
| 2461 | agaggaaact tgcatacaga gacagatata ctgggagaaa tgactttgaa aacctggctc |
| 2521 | taaggtggga tcactaaggg atggggcagt ctctgcccaa acataaagag aactctgggg |
| 2581 | agcctgagcc acaaaaatgt tcctttattt tatgtaaacc ctcaagggtt atagactgcc |
| 2641 | atgctagaca agcttgtcca tgtaatattc ccatgttttt accctgcccc tgccttgatt |
| 2701 | agactcctag cacctggcta gtttctaaca tgttttgtgc agcacagttt ttaataaatg |
| 2761 | cttgttacat tcatttaaaa aaaaaaaaaa. |

[0399] Compositions of the disclosure may comprise a gRNA comprising a spacer sequence that specifically binds to a target sequence of an RNA molecule encoding CD86 protein comprising or consisting of 20 nucleotides of the sequence of

| (SEQ ID NO: 228) | |
|---|---|
| 1 | ccctttctgt atttgagttc taccgtcagt cctggcatta tttctctctc tacaaggagc |
| 61 | cttaggaggt acggggagct cgcaaatact ccttttggtt tattcttacc accttgcttc |
| 121 | tgtgttcctt gggaatgctg ctgtgcttat gcatctggtc tctttttgga gctacagtgg |
| 181 | acaggcattt gtgacagcac tatgggactg agtaacattc tctttgtgat ggccttcctg |
| 241 | ctctctggtg ctgctcctct gaagattcaa gcttatttca atgagactgc agacctgcca |
| 301 | tgccaatttg caaactctca aaaccaaagc ctgagtgagc tagtagtatt ttggcaggac |
| 361 | caggaaaact tggttctgaa tgaggtatac ttaggcaaag agaaatttga cagtgttcat |
| 421 | tccaagtata tgggccgcac aagttttgat tcggacagtt ggaccctgag acttcacaat |
| 481 | cttcagatca aggacaaggg cttgtatcaa tgtatcatcc atcacaaaaa gcccacagga |
| 541 | atgattcgca tccaccagat gaattctgaa ctgtcagtgc ttgctaactt cagtcaacct |
| 601 | gaaatagtac caatttctaa tataacagaa aatgtgtaca taaatttgac ctgctcatct |
| 661 | atacacggtt acccagaacc taagaagatg agtgttttgc taagaaccaa gaattcaact |
| 721 | atcgagtatg atggtattat gcagaaatct caagataatg tcacagaact gtacgacgtt |
| 781 | tccatcagct tgtctgtttc attccctgat gttacgagca atatgaccat cttctgtatt |
| 841 | ctggaaactg acaagacgcg gcttttatct tcacctttct ctataggaac caacacaatg |
| 901 | gagagggaag agagtgaaca gaccaagaaa agagaaaaaa tccatatacc tgaaagatct |
| 961 | gatgaagccc agcgtgtttt taaaagttcg aagacatctt catgcgacaa aagtgataca |
| 1021 | tgtttttaat taaagagtaa agcccataca agtattcatt ttttctaccc tttcctttgt |
| 1081 | aagttcctgg gcaacctttt tgatttcttc cagaaggcaa aaagacatta ccatgagtaa |
| 1141 | taagggggct ccaggactcc ctctaagtgg aatagcctcc ctgtaactcc agctctgctc |
| 1201 | cgtatgccaa gaggagactt taattctctt actgcttctt ttcacttcag agcacactta |
| 1261 | tgggccaagc ccagcttaat ggctcatgac ctggaaataa aatttaggac caatacctcc |
| 1321 | tccagatcag attcttctct taatttcata gattgtgttt tttttttaaa tagacctctc |
| 1381 | aatttctgga aaactgcctt ttatctgccc agaattctaa gctggtgccc cactgaattt |
| 1441 | tgtgtacctg tgactaaaca actacctcct cagtctgggt gggacttatg tatttatgac |
| 1501 | cttatagtgt taatatcttg aaacatagag atctatgtac tgtaatagtg tgattactat |
| 1561 | gctctagaga aaagtctacc cctgctaagg agttctcatc cctctgtcag ggtcagtaag |
| 1621 | gaaaacggtg gcctagggta caggcaacaa tgagcagacc aacctaaatt tggggaaatt |
| 1681 | aggagaggca gagatagaac ctggagccac ttctatctgg gctgttgcta atattgagga |
| 1741 | ggcttgcccc acccaacaag ccatagtgga gagaactgaa taaacaggaa aatgccagag |
| 1801 | cttgtgaacc ctgtttctct tgaagaactg actagtgaga tggcctgggg aagctgtgaa |
| 1861 | agaaccaaaa gagatcacaa tactcaaaag agagagagag agaaaaaaga gagatcttga |
| 1921 | tccacagaaa tacatgaaat gtctggtctg tccaccccat caacaagtct tgaaacaagc |
| 1981 | aacagatgga tagtctgtcc aaatggacat aagacagaca gcagtttccc tggtggtcag |
| 2041 | ggaggggttt tggtgatacc caagttattg ggatgtcatc ttcctggaag cagagctggg |
| 2101 | gagggagagc catcaccttg ataatgggat gaatggaagg aggcttagga ctttccactc |
| 2161 | ctggctgaga gaggaagagc tgcaacggaa ttaggaagac caagacacag atcacccggg |
| 2221 | gcttacttag cctacagatg tcctacggga acgtgggctg gcccagcata gggctagcaa |
| 2281 | atttgagttg gatgattgtt tttgctcaag gcaaccagag gaaacttgca tacagagaca |
| 2341 | gatatactgg gagaaatgac tttgaaaacc tggctctaag gtgggatcac taagggatgg |
| 2401 | ggcagtctct gcccaaacat aaagagaact ctggggagcc tgagccacaa aaatgttcct |
| 2461 | ttattttatg taaaccctca agggttatag actgccatgc tagacaagct tgtccatgta |
| 2521 | atattcccat gtttttaccc tgcccctgcc ttgattagac tcctagcacc tggctagttt |
| 2581 | ctaacatgtt ttgtgcagca cagtttttaa taaatgcttg ttacattcat ttaaaaaaaa |
| 2641 | aaaaaa. |

[0400] Compositions of the disclosure may comprise a gRNA comprising a spacer sequence that specifically binds to a target sequence of an RNA molecule encoding CD86 protein comprising or consisting of 20 nucleotides of the sequence of

| (SEQ ID NO: 229) | |
|---|---|
| 1 | agtcattgcc gaggaaggct tgcacagggt gaaagctttg cttctctgct gctgtaacag |
| 61 | ggactagcac agacacacgg atgagtgggg tcatttccag atattaggtc acagcagaag |
| 121 | cagccaaaat ggatccccag tgcactatgg gactgagtaa cattctcttt gtgatggcct |
| 181 | tcctgctctc tgctaacttc agtcaacctg aaatagtacc aatttctaat ataacagaaa |
| 241 | atgtgtacat aaatttgacc tgctcatcta tacacggtta cccagaacct aagaagatga |
| 301 | gtgttttgct aagaaccaag aattcaacta tcgagtatga tggtattatg cagaaatctc |
| 361 | aagataatgt cacagaactg tacgacgttt ccatcagctt gtctgtttca ttccctgatg |
| 421 | ttacgagcaa tatgaccatc ttctgtattc tggaaactga caagacgcgg cttttatctt |
| 481 | cacctttctc tatagagctt gaggaccctc agcctccccc agaccacatt ccttggatta |
| 541 | cagctgtact tccaacagtt attatatgtg tgatggtttt ctgtctaatt ctatggaaat |
| 601 | ggaagaagaa gaagcggcct cgcaactctt ataaatgtgg aaccaacaca atggagaggg |
| 661 | aagagagtga acagaccaag aaaagagaaa aaatccatat acctgaaaga tctgatgaag |
| 721 | cccagcgtgt ttttaaaagt tcgaagacat cttcatgcga caaaagtgat acatgttttt |
| 781 | aattaaagag taaagcccat acaagtattc attttttcta ccctttcctt tgtaagttcc |
| 841 | tgggcaacct ttttgatttc ttccagaagg caaaaagaca ttaccatgag taataagggg |
| 901 | gctccaggac tccctctaag tggaatagcc tccctgtaac tccagctctg ctccgtatgc |
| 961 | caagaggaga ctttaattct cttactgctt cttttcactt cagagcacac ttatgggcca |
| 1021 | agcccagctt aatggctcat gacctggaaa taaaatttag gaccaatacc tcctccagat |
| 1081 | cagattcttc tcttaatttc atagattgtg tttttttttt aaatagacct ctcaatttct |
| 1141 | ggaaaactgc cttttatctg cccagaattc taagctggtg ccccactgaa ttttgtgtac |
| 1201 | ctgtgactaa acaactacct cctcagtctg ggtgggactt atgtatttat gaccttatag |
| 1261 | tgttaatatc ttgaaacata gagatctatg tactgtaata gtgtgattac tatgctctag |
| 1321 | agaaaagtct acccctgcta aggagttctc atccctctgt cagggtcagt aaggaaaacg |
| 1381 | gtggcctagg gtacaggcaa caatgagcag accaacctaa atttggggaa attaggagag |
| 1441 | gcagagatag aacctggagc cacttctatc tgggctgttg ctaatattga ggaggcttgc |
| 1501 | cccacccaac aagccatagt ggagagaact gaataaacag gaaaatgcca gagcttgtga |
| 1561 | accctgtttc tcttgaagaa ctgactagtg agatggcctg gggaagctgt gaaagaacca |
| 1621 | aaagagatca caatactcaa aagagagaga gagagaaaaa agagagatct tgatccacag |
| 1681 | aaatacatga aatgtctggt ctgtccaccc catcaacaag tcttgaaaca agcaacagat |
| 1741 | ggatagtctg tccaaatgga cataagacag acagcagttt ccctggtggt cagggagggg |
| 1801 | ttttggtgat acccaagtta ttgggatgtc atcttcctgg aagcagagct ggggagggag |
| 1861 | agccatcacc ttgataatgg gatgaatgga aggaggctta ggactttcca ctcctggctg |
| 1921 | agagaggaag agctgcaacg gaattaggaa gaccaagaca cagatcaccc ggggcttact |
| 1981 | tagcctacag atgtcctacg ggaacgtggg ctggcccagc atagggctag caaatttgag |
| 2041 | ttggatgatt gtttttgctc aaggcaacca gaggaaactt gcatacagag acagatatac |
| 2101 | tgggagaaat gactttgaaa acctggctct aaggtgggat cactaaggga tggggcagtc |
| 2161 | tctgcccaaa cataaagaga actctgggga gcctgagcca caaaaatgtt cctttatttt |
| 2221 | atgtaaaccc tcaagggtta tagactgcca tgctagacaa gcttgtccat gtaatattcc |
| 2281 | catgttttta ccctgcccct gccttgatta gactcctagc acctggctag tttctaacat |
| 2341 | gttttgtgca gcacagtttt taataaatgc ttgttacatt catttaaaaa aaaaaaaaa. |

[0401] Compositions of the disclosure may comprise a gRNA comprising a spacer sequence that specifically binds to a target sequence of an RNA molecule encoding CD86 protein comprising or consisting of 20 nucleotides of the sequence of

| (SEQ ID NO: 230) | |
|---|---|
| 1 | agtcattgcc gaggaaggct tgcacagggt gaaagctttg cttctctgct gctgtaacag |
| 61 | ggactagcac agacacacgg atgagtgggg tcatttccag atattaggtc acagcagaag |
| 121 | cagccaaaat ggatccccag tggtgctgct cctctgaaga ttcaagctta tttcaatgag |
| 181 | actgcagacc tgccatgcca atttgcaaac tctcaaaacc aaagcctgag tgagctagta |
| 241 | gtattttggc aggaccagga aaacttggtt ctgaatgagg tatacttagg caaagagaaa |
| 301 | tttgacagtg ttcattccaa gtatatgggc cgcacaagtt ttgattcgga cagttggacc |
| 361 | ctgagacttc acaatcttca gatcaaggac aagggcttgt atcaatgtat catccatcac |
| 421 | aaaaagccca caggaatgat tcgcatccac cagatgaatt ctgaactgtc agtgcttgct |
| 481 | aacttcagtc aacctgaaat agtaccaatt tctaatataa cagaaaatgt gtacataaat |
| 541 | ttgacctgct catctataca cggttaccca gaacctaaga agatgagtgt tttgctaaga |
| 601 | accaagaatt caactatcga gtatgatggt attatgcaga aatctcaaga taatgtcaca |
| 661 | gaactgtacg acgtttccat cagcttgtct gtttcattcc ctgatgttac gagcaatatg |
| 721 | accatcttct gtattctgga aactgacaag acgcggcttt tatcttcacc tttctctata |
| 781 | gagcttgagg accctcagcc tcccccagac cacattcctt ggattacagc tgtacttcca |
| 841 | acagttatta tatgtgtgat ggttttctgt ctaattctat ggaaatggaa gaagaagaag |
| 901 | cggcctcgca actcttataa atgtggaacc aacacaatgg agagggaaga gagtgaacag |
| 961 | accaagaaaa gagaaaaaat ccatatacct gaaagatctg atgaagccca gcgtgttttt |
| 1021 | aaaagttcga agacatcttc atgcgacaaa agtgatacat gtttttaatt aaagagtaaa |
| 1081 | gcccatacaa gtattcattt tttctaccct ttcctttgta agttcctggg caaccttttt |
| 1141 | gatttcttcc agaaggcaaa aagacattac catgagtaat aagggggctc caggactccc |
| 1201 | tctaagtgga atagcctccc tgtaactcca gctctgctcc gtatgccaag aggagacttt |
| 1261 | aattctctta ctgcttcttt tcacttcaga gcacacttat gggccaagcc cagcttaatg |
| 1321 | gctcatgacc tggaaataaa atttaggacc aatacctcct ccagatcaga ttcttctctt |
| 1381 | aatttcatag attgtgtttt ttttttaaat agacctctca atttctggaa aactgccttt |
| 1441 | tatctgccca gaattctaag ctggtgcccc actgaatttt gtgtacctgt gactaaacaa |
| 1501 | ctacctcctc agtctgggtg ggacttatgt atttatgacc ttatagtgtt aatatcttga |
| 1561 | aacatagaga tctatgtact gtaatagtgt gattactatg ctctagagaa aagtctaccc |
| 1621 | ctgctaagga gttctcatcc ctctgtcagg gtcagtaagg aaaacggtgg cctagggtac |
| 1681 | aggcaacaat gagcagacca acctaaattt ggggaaatta ggagaggcag agatagaacc |
| 1741 | tggagccact tctatctggg ctgttgctaa tattgaggag gcttgcccca cccaacaagc |
| 1801 | catagtggag agaactgaat aaacaggaaa atgccagagc ttgtgaaccc tgtttctctt |
| 1861 | gaagaactga ctagtgagat ggcctgggga agctgtgaaa gaaccaaaag agatcacaat |
| 1921 | actcaaaaga gagagagaga gaaaaaagag agatcttgat ccacagaaat acatgaaatg |
| 1981 | tctggtctgt ccaccccatc aacaagtctt gaaacaagca acagatggat agtctgtcca |
| 2041 | aatggacata agacagacag cagtttccct ggtggtcagg gaggggtttt ggtgataccc |
| 2101 | aagttattgg gatgtcatct tcctggaagc agagctgggg agggagagcc atcaccttga |
| 2161 | taatgggatg aatggaagga ggcttaggac tttccactcc tggctgagag aggaagagct |
| 2221 | gcaacggaat taggaagacc aagacacaga tcacccgggg cttacttagc ctacagatgt |
| 2281 | cctacgggaa cgtgggctgg cccagcatag ggctagcaaa tttgagttgg atgattgttt |
| 2341 | ttgctcaagg caaccagagg aaacttgcat acagagacag atatactggg agaaatgact |
| 2401 | ttgaaaacct ggctctaagg tgggatcact aagggatggg gcagtctctg cccaaacata |
| 2461 | aagagaactc tggggagcct gagccacaaa aatgttcctt tattttatgt aaaccctcaa |
| 2521 | gggttataga ctgccatgct agacaagctt gtccatgtaa tattcccatg tttttaccct |
| 2581 | gcccctgcct tgattagact cctagcacct ggctagtttc taacatgttt tgtgcagcac |
| 2641 | agtttttaat aaatgcttgt tacattcatt taaaaaaaaa aaaaa. |

[0402] Compositions of the disclosure may comprise a gRNA comprising a spacer sequence that specifically binds to a target sequence of an RNA molecule encoding ICOSLG protein comprising or consisting of 20 nucleotides of the sequence of

| (SEQ ID NO: 231) | |
|---|---|
| 1 | AGTTAGAGCC GATCTCCCGC GCCCCGAGGT TGCTCCTCTC CGAGGTCTCC CGCGGCCCAA |
| 61 | GTTCTCCGCG CCCCGAGGTC TCCGCGCCCC GAGGTCTCCG CGGCCCGAGG TCTCCGCCCG |
| 121 | CACCATGCGG CTGGGCAGTC CTGGACTGCT CTTCCTGCTC TTCAGCAGCC TTCGAGCTGA |
| 181 | TACTCAGGAG AAGGAAGTCA GAGCGATGGT AGGCAGCGAC GTGGAGCTCA GCTGCGCTTG |
| 241 | CCCTGAAGGA AGCCGTTTTG ATTTAAATGA TGTTTACGTA TATTGGCAAA CCAGTGAGTC |
| 301 | GAAAACCGTG GTGACCTACC ACATCCCACA GAACAGCTCC TTGGAAAACG TGGACAGCCG |
| 361 | CTACCGGAAC CGAGCCCTGA TGTCACCGGC CGGCATGCTG CGGGGCGACT TCTCCCTGCG |
| 421 | CTTGTTCAAC GTCACCCCCC AGGACGAGCA GAAGTTTCAC TGCCTGGTGT TGAGCCAATC |
| 481 | CCTGGGATTC CAGGAGGTTT TGAGCGTTGA GGTTACACTG CATGTGGCAG CAAACTTCAG |
| 541 | CGTGCCCGTC GTCAGCGCCC CCCACAGCCC CTCCCAGGAT GAGCTCACCT TCACGTGTAC |
| 601 | ATCCATAAAC GGCTACCCCA GGCCCAACGT GTACTGGATC AATAAGACGG ACAACAGCCT |
| 661 | GCTGGACCAG GCTCTGCAGA ATGACACCGT CTTCTTGAAC ATGCGGGGCT TGTATGACGT |
| 721 | GGTCAGCGTG CTGAGGATCG CACGGACCCC CAGCGTGAAC ATTGGCTGCT GCATAGAGAA |
| 781 | CGTGCTTCTG CAGCAGAACC TGACTGTCGG CAGCCAGACA GGAAATGACA TCGGAGAGAG |
| 841 | AGACAAGATC ACAGAGAATC CAGTCAGTAC CGGCGAGAAA AACGCGGCCA CGTGGAGCAT |
| 901 | CCTGGCTGTC CTGTGCCTGC TTGTGGTCGT GGCGGTGGCC ATAGGCTGGG TGTGCAGGGA |
| 961 | CCGATGCCTC CAACACAGCT ATGCAGGTGC CTGGGCTGTG AGTCCGGAGA CAGAGCTCAC |
| 1021 | TGGTGAGTTT GCCGTGGGAA GCAGCAGGTT CTGGGGGGCC CAGGGGAGGC TTGGCTGCCA |
| 1081 | GCTGTCTTTC AGAGTTTCAA AAAACTTTCA AAAGGCAAAA GTCCCTTGCC TTGAACAACT |
| 1141 | GTTGTTCCTG GAGACGCAGC GAAGCCCTCG ATGGTGCGCA TGGCATTTCC TGCAGCCTCC |
| 1201 | CCTTGGCATG GGATGGCATC CTGGTGTGCA CTTTGTCACA CTGCGATGGG ATTTTCCCAA |
| 1261 | CATGCACAGA AGCAGAGAGA CGAGTGCTAG ACCCCCGCGC TCCCCAGTGC CCAGCCCCGA |
| 1321 | CCAGGGTGTC CAGGGCGGGT CCAGGCACCG GCGCCCAGCC CCCATGGGGT GTCCGGAGTG |
| 1381 | GGTCCAGGCA CCGGCGCCCA GCCCCCGTGG GGTGTCCAGG GCGGGTCCAG GCACCGGCGC |
| 1441 | CCAGCCCCTG TGGGGTGTCC GGAGTGGGTC CGGGCACCGC CAGCTTCTCT CTGTGGCAGC |
| 1501 | CACTCCTGCA GCTCTCGTTT GCCCCTCAGT TCCAGGAGCA ACATAGATGT GGATTCCTGT |
| 1561 | CCAATTTGGG AAAAATGTCC ACACACGGTC ACCCACCTGG CAGGTGCCTC TGGCTGCAAG |
| 1621 | GGGCGCTGGG CTTCGCAGGC AGGCCAGCCG GGCTCCCCGC CATGGGCCAG GATCCCCTCC |
| 1681 | GAGCCCTGTT TGCCGCCCAG GAGAAGGGGT TCCCCGGGGA CAGTGGGCTC AGGGTGTGCG |
| 1741 | CAGCCACCAT GCTGTGGTGT CACCTGTGGA CCCAGGCGAG CTGATGGCCG ACCGCAGAAA |
| 1801 | CGCACTTCCA AGGCCAGGTC GGCCCATCCA GATGATGCAG GAACACAGCT TGCTAAAAAC |
| 1861 | ACGGCCGGCC TGTTCCCGTC GGAGCCAGTC GAAGTTCCCT GAACAGGCCG CTGTTTCCGA |
| 1921 | AGCTTTAAAC CCTGTGTTTC CACCAAGCTG AGTCCTGAGA AAACCGACGT CTGCCTGCAG |
| 1981 | AAGGGAAAGG GGTGCTTCAT GTTCCTCTCT CTCCTTCATC TCCCT. |

[0403] Exemplary gRNA spacer sequences of the disclosure that specifically bind to a target sequence of an RNA molecule encoding a IOSLG protein of the disclosure may comprise or consist of a nucleic acid having a sequence selected from any one of any one of SEQ ID NO: 5784 to SEQ ID NO: 7789.

[0404] Compositions of the disclosure may comprise a gRNA comprising a spacer sequence that specifically binds to a target sequence of an RNA molecule encoding OX40L protein comprising or consisting of 20 nucleotides of the sequence of

| (SEQ ID NO: 232) | |
|---|---|
| 1 | GGCCCTGGGA CCTTTGCCTA TTTTCTGATT GATAGGCTTT GTTTTGTCTT TACCTCCTTC |
| 61 | TTTCTGGGGA AAACTTCAGT TTTATCGCAC GTTCCCCTTT TCCATATCTT CATCTTCCCT |
| 121 | CTACCCAGAT TGTGAAGATG GAAAGGGTCC AACCCCTGGA AGAGAATGTG GGAAATGCAG |
| 181 | CCAGGCCAAG ATTCGAGAGG AACAAGCTAT TGCTGGTGGC CTCTGTAATT CAGGGACTGG |
| 241 | GGCTGCTCCT GTGCTTCACC TACATCTGCC TGCACTTCTC TGCTCTTCAG GTATCACATC |
| 301 | GGTATCCTCG AATTCAAAGT ATCAAAGTAC AATTTACCGA ATATAAGAAG GAGAAAGGTT |
| 361 | TCATCCTCAC TTCCCAAAAG GAGGATGAAA TCATGAAGGT GCAGAACAAC TCAGTCATCA |
| 421 | TCAACTGTGA TGGGTTTTAT CTCATCTCCC TGAAGGGCTA CTTCTCCCAG GAAGTCAACA |
| 481 | TTAGCCTTCA TTACCAGAAG GATGAGGAGC CCCTCTTCCA ACTGAAGAAG GTCAGGTCTG |
| 541 | TCAACTCCTT GATGGTGGCC TCTCTGACTT ACAAAGACAA AGTCTACTTG AATGTGACCA |
| 601 | CTGACAATAC CTCCCTGGAT GACTTCCATG TGAATGGCGG AGAACTGATT CTTATCCATC |
| 661 | AAAATCCTGG TGAATTCTGT GTCCTTTGAG GGGCTGATGG CAATATCTAA AACCAGGCAC |
| 721 | CAGCATGAAC ACCAAGCTGG GGGTGGACAG GGCATGGATT CTTCATTGCA AGTGAAGGAG |
| 781 | CCTCCCAGCT CAGCCACGTG GGATGTGACA AGAAGCAGAT CCTGGCCCTC CCGCCCCCAC |
| 841 | CCCTCAGGGA TATTTAAAAC TTATTTTATA TACCAGTTAA TCTTATTTAT CCTTATATTT |
| 901 | TCTAAATTGC CTAGCCGTCA CACCCCAAGA TTGCCTTGAG CCTACTAGGC ACCTTTGTGA |
| 961 | GAAAGAAAAA ATAGATGCCT CTTCTTCAAG ATGCATTGTT TCTATTGGTC AGGCAATTGT |
| 1021 | CATAATAAAC TTATGTCATT GAAAACGGTA CCTGACTACC ATTTGCTGGA AATTTGACAT |
| 1081 | GTGTGTGGCA TTATCAAAAT GAAGAGGAGC AAGGAGTGAA GGAGTGGGGT TATGAATCTG |
| 1141 | CCAAAGGTGG TATGAACCAA CCCCTGGAAG CCAAAGCGGC CTCTCCAAGG TTAAATTGAT |
| 1201 | TGCAGTTTGC ATATTGCCTA AATTTAAACT TTCTCATTTG GTGGGGGTTC AAAAGAAGAA |
| 1261 | TCAGCTTGTG AAAAATCAGG ACTTGAAGAG AGCCGTCTAA GAAATACCAC GTGCTTTTTT |
| 1321 | TCTTTACCAT TTTGCTTTCC CAGCCTCCAA ACATAGTTAA TAGAAATTTC CCTTCAAAGA |
| 1381 | ACTGTCTGGG GATGTGATGC TTTGAAAAAT CTAATCAGTG ACTTAAGAGA GATTTTCTTG |
| 1441 | TATACAGGGA GAGTGAGATA ACTTATTGTG AAGGGTTAGC TTTACTGTAC AGGATAGCAG |
| 1501 | GGAACTGGAC ATCTCAGGGT AAAAGTCAGT ACGGATTTTA ATAGCCTGGG GAGGAAAACA |
| 1561 | CATTCTTTGC CACAGACAGG CAAAGCAACA CATGCTCATC CTCCTGCCTA TGCTGAGATA |
| 1621 | CGCACTCAGC TCCATGTCTT GTACACACAG AAACATTGCT GGTTTCAAGA AATGAGGTGA |
| 1681 | TCCTATTATC AAATTCAATC TGATGTCAAA TAGCACTAAG AAGTTATTGT GCCTTATGAA |
| 1741 | AAATAATGAT CTCTGTCTAG AAATACCATA GACCATATAT AGTCTCACAT TGATAATTGA |
| 1801 | AACTAGAAGG GTCTATAATC AGCCTATGCC AGGGCTTCAA TGGAATAGTA TCCCCTTATG |
| 1861 | TTTAGTTGAA ATGTCCCCTT AACTTGATAT AATGTGTTAT GCTTATGGCG CTGTGGACAA |
| 1921 | TCTGATTTTT CATGTCAACT TTCCAGATGA TTTGTAACTT CTCTGTGCCA AACCTTTTAT |
| 1981 | AAACATAAAT TTTTGAGATA TGTATTTTAA AATTGTAGCA CATGTTTCCC TGACATTTTC |
| 2041 | AATAGAGGAT ACAACATCAC AGAATCTTTC TGGATGATTC TGTGTTATCA AGGAATTGTA |
| 2101 | CTGTGCTACA ATTATCTCTA GAATCTCCAG AAAGGTGGAG GGCTGTTCGC CCTTACACTA |
| 2161 | AATGGTCTCA GTTGGATTTT TTTTTCCTGT TTTCTATTTC CTCTTAAGTA CACCTTCAAC |
| 2221 | TATATTCCCA TCCCTCTATT TTAATCTGTT ATGAAGGAAG GTAAATAAAA ATGCTAAATA |
| 2281 | GAAGAAATTG TAGGTAAGGT AAGAGGAATC AAGTTCTGAG TGGCTGCCAA GGCACTCACA |
| 2341 | GAATCATAAT CATGGCTAAA TATTTATGGA GGGCCTACTG TGGACCAGGC ACTGGGCTAA |
| 2401 | ATACTTACAT TTACAAGAAT CATTCTGAGA CAGATATTCA ATGATATCTG GCTTCACTAC |
| 2461 | TCAGAAGATT GTGTGTGTGT TTGTGTGTGT GTGTGTGTGT GTATTTCACT TTTTGTTATT |
| 2521 | GACCATGTTC TGCAAAATTG CAGTTACTCA GTGAGTGATA TCCGAAAAAG TAAACGTTTA |
| 2581 | TGACTATAGG TAATATTTAA GAAAATGCAT GGTTCATTTT TAAGTTTGGA ATTTTTATCT |
| 2641 | ATATTTCTCA CAGATGTGCA GTGCACATGC AGGCCTAAGT ATATGTTGTG TGTGTTGTTT |
| 2701 | GTCTTTGATG TCATGGTCCC CTCTCTTAGG TGCTCACTCG CTTTGGGTGC ACCTGGCCTG |
| 2761 | CTCTTCCCAT GTTGGCCTCT GCAACCACAC AGGGATATTT CTGCTATGCA CCAGCCTCAC |
| 2821 | TCCACCTTCC TTCCATCAAA AATATGTGTG TGTGTCTCAG TCCCTGTAAG TCATGTCCTT |
| 2881 | CACAGGGAGA ATTAACCCTT CGATATACAT GGCAGAGTTT TGTGGGAAAA GAATTGAATG |
| 2941 | AAAAGTCAGG AGATCAGAAT TTTAAATTTG ACTTAGCCAC TAACTAGCCA TGTAACCTTG |
| 3001 | GGAAAGTCAT TTCCCATTTC TGGGTCTTGC TTTTCTTTCT GTTAAATGAG AGGAATGTTA |
| 3061 | AATATCTAAC AGTTTAGAAT CTTATGCTTA CAGTGTTATC TGTGAATGCA CATATTAAAT |
| 3121 | GTCTATGTTC TTGTTGCTAT GAGTCAAGGA GTGTAACCTT CTCCTTTACT ATGTTGAATG |
| 3181 | TATTTTTTTC TGGACAAGCT TACATCTTCC TCAGCCATCT TTGTGAGTCC TTCAAGAGCA |
| 3241 | GTTATCAATT GTTAGTTAGA TATTTTCTAT TTAGAGAATG CTTAAGGGAT TCCAATCCCG |
| 3301 | ATCCAAATCA TAATTTGTTC TTAAGTATAC TGGGCAGGTC CCCTATTTTA AGTCATAATT |
| 3361 | TTGTATTTAG TGCTTTCCTG GCTCTCAGAG AGTATTAATA TTGATATTAA TAATATAGTT |
| 3421 | AATAGTAATA TTGCTATTTA CATGGAAACA AATAAAAGAT CTCAGAATTC ACTAAAAAAA |
| 3481 | AAAA. |

[0405] Exemplary gRNA spacer sequences of the disclosure that specifically bind to a target sequence of an RNA molecule encoding a OX40L protein of the disclosure may comprise or consist of a nucleic acid having a sequence selected from any one of any one of SEQ ID NO: 7790 to SEQ ID NO: 11254.

[0406] Compositions of the disclosure may comprise a gRNA comprising a spacer sequence that specifically binds to a target sequence of an RNA molecule encoding IL12 protein comprising or consisting of 20 nucleotides of the sequence of

| (SEQ ID NO: 233) | |
|---|---|
| 1 | TTTCGCTTTC ATTTTGGGCC GAGCTGGAGG CGGCGGGGCC GTCCCGGAAC GGCTGCGGCC |
| 61 | GGGCACCCCG GGAGTTAATC CGAAAGCGCC GCAAGCCCCG CGGGCCGGCC GCACCGCACG |
| 121 | TGTCACCGAG AAGCTGATGT AGAGAGAGAC ACAGAAGGAG ACAGAAAGCA AGAGACCAGA |
| 181 | GTCCCGGGAA AGTCCTGCCG CGCCTCGGGA CAATTATAAA AATGTGGCCC CCTGGGTCAG |
| 241 | CCTCCCAGCC ACCGCCCTCA CCTGCCGCGG CCACAGGTCT GCATCCAGCG GCTCGCCCTG |
| 301 | TGTCCCTGCA GTGCCGGCTC AGCATGTGTC CAGCGCGCAG CCTCCTCCTT GTGGCTACCC |
| 361 | TGGTCCTCCT GGACCACCTC AGTTTGGCCA GAAACCTCCC CGTGGCCACT CCAGACCCAG |
| 421 | GAATGTTCCC ATGCCTTCAC CACTCCCAAA ACCTGCTGAG GGCCGTCAGC AACATGCTCC |
| 481 | AGAAGGCCAG ACAAACTCTA GAATTTTACC CTTGCACTTC TGAAGAGATT GATCATGAAG |
| 541 | ATATCACAAA AGATAAAACC AGCACAGTGG AGGCCTGTTT ACCATTGGAA TTAACCAAGA |
| 601 | ATGAGAGTTG CCTAAATTCC AGAGAGACCT CTTTCATAAC TAATGGGAGT TGCCTGGCCT |
| 661 | CCAGAAAGAC CTCTTTTATG ATGGCCCTGT GCCTTAGTAG TATTTATGAA GACTTGAAGA |
| 721 | TGTACCAGGT GGAGTTCAAG ACCATGAATG CAAAGCTTCT GATGGATCCT AAGAGGCAGA |
| 781 | TCTTTCTAGA TCAAAACATG CTGGCAGTTA TTGATGAGCT GATGCAGGCC CTGAATTTCA |
| 841 | ACAGTGAGAC TGTGCCACAA AAATCCTCCC TTGAAGAACC GGATTTTTAT AAAACTAAAA |
| 901 | TCAAGCTCTG CATACTTCTT CATGCTTTCA GAATTCGGGC AGTGACTATT GATAGAGTGA |
| 961 | TGAGCTATCT GAATGCTTCC TAAAAAGCGA GGTCCCTCCA AACCGTTGTC ATTTTTATAA |
| 1021 | AACTTTGAAA TGAGGAAACT TTGATAGGAT GTGGATTAAG AACTAGGGAG GGGGAAAGAA |
| 1081 | GGATGGGACT ATTACATCCA CATGATACCT CTGATCAAGT ATTTTTGACA TTTACTGTGG |
| 1141 | ATAAATTGTT TTTAAGTTTT CATGAATGAA TTGCTAAGAA GGGAAAATAT CCATCCTGAA |
| 1201 | GGTGTTTTTC ATTCACTTTA ATAGAAGGGC AAATATTTAT AAGCTATTTC TGTACCAAAG |
| 1261 | TGTTTGTGGA AACAAACATG TAAGCATAAC TTATTTTAAA ATATTTATTT ATATAACTTG |
| 1321 | GTAATCATGA AAGCATCTGA GCTAACTTAT ATTTATTTAT GTTATATTTA TTAAATTATT |
| 1381 | TATCAAGTGT ATTTGAAAAA TATTTTTAAG TGTTCTAAAA ATAAAAGTAT TGAATTAAAG |
| 1441 | TGAAAAAAAA. |

[0407] Exemplary gRNA spacer sequences of the disclosure that specifically bind to a target sequence of an RNA molecule encoding an IL12 protein of the disclosure may comprise or consist of a nucleic acid having a sequence selected from any one of any one of SEQ ID NO: 11255 to SEQ ID NO: 12685.

[0408] Compositions of the disclosure may comprise a gRNA comprising a spacer sequence that specifically binds to a target sequence of an RNA molecule encoding CCR7 protein comprising or consisting of 20 nucleotides of the sequence of

| (SEQ ID NO: 234) | |
|---|---|
| 1 | CACTTCCTCC CCAGACAGGG GTAGTGCGAG GCCGGGCACA GCCTTCCTGT GTGGTTTTAC |
| 61 | CGCCCAGAGA GCGTCATGGA CCTGGGGAAA CCAATGAAAA GCGTGCTGGT GGTGGCTCTC |
| 121 | CTTGTCATTT TCCAGGTATG CCTGTGTCAA GATGAGGTCA CGGACGATTA CATCGGAGAC |
| 181 | AACACCACAG TGGACTACAC TTTGTTCGAG TCTTTGTGCT CCAAGAAGGA CGTGCGGAAC |
| 241 | TTTAAAGCCT GGTTCCTCCC TATCATGTAC TCCATCATTT GTTTCGTGGG CCTACTGGGC |
| 301 | AATGGGCTGG TCGTGTTGAC CTATATCTAT TTCAAGAGGC TCAAGACCAT GACCGATACC |
| 361 | TACCTGCTCA ACCTGGCGGT GGCAGACATC CTCTTCCTCC TGACCCTTCC CTTCTGGGCC |
| 421 | TACAGCGCGG CCAAGTCCTG GGTCTTCGGT GTCCACTTTT GCAAGCTCAT CTTTGCCATC |
| 481 | TACAAGATGA GCTTCTTCAG TGGCATGCTC CTACTTCTTT GCATCAGCAT TGACCGCTAC |
| 541 | GTGGCCATCG TCCAGGCTGT CTCAGCTCAC CGCCACCGTG CCCGCGTCCT TCTCATCAGC |
| 601 | AAGCTGTCCT GTGTGGGCAT CTGGATACTA GCCACAGTGC TCTCCATCCC AGAGCTCCTG |
| 661 | TACAGTGACC TCCAGAGGAG CAGCAGTGAG CAAGCGATGC GATGCTCTCT CATCACAGAG |
| 721 | CATGTGGAGG CCTTTATCAC CATCCAGGTG GCCCAGATGG TGATCGGCTT TCTGGTCCCC |
| 781 | CTGCTGGCCA TGAGCTTCTG TTACCTTGTC ATCATCCGCA CCCTGCTCCA GGCACGCAAC |
| 841 | TTTGAGCGCA ACAAGGCCAT CAAGGTGATC ATCGCTGTGG TCGTGGTCTT CATAGTCTTC |
| 901 | CAGCTGCCCT ACAATGGGGT GGTCCTGGCC CAGACGGTGG CCAACTTCAA CATCACCAGT |
| 961 | AGCACCTGTG AGCTCAGTAA GCAACTCAAC ATCGCCTACG ACGTCACCTA CAGCCTGGCC |
| 1021 | TGCGTCCGCT GCTGCGTCAA CCCTTTCTTG TACGCCTTCA TCGGCGTCAA GTTCCGCAAC |
| 1081 | GATCTCTTCA AGCTCTTCAA GGACCTGGGC TGCCTCAGCC AGGAGCAGCT CCGGCAGTGG |
| 1141 | TCTTCCTGTC GGCACATCCG GCGCTCCTCC ATGAGTGTGG AGGCCGAGAC CACCACCACC |
| 1201 | TTCTCCCCAT AGGCGACTCT TCTGCCTGGA CTAGAGGGAC CTCTCCCAGG GTCCCTGGGG |
| 1261 | TGGGGATAGG GAGCAGATGC AATGACTCAG GACATCCCCC CGCCAAAAGC TGCTCAGGGA |
| 1321 | AAAGCAGCTC TCCCCTCAGA GTGCAAGCCC CTGCTCCAGA AGATAGCTTC ACCCCAATCC |
| 1381 | CAGCTACCTC AACCAATGCC AAAAAAAGAC AGGGCTGATA AGCTAACACC AGACAGACAA |
| 1441 | CACTGGGAAA CAGAGGCTAT TGTCCCCTAA ACCAAAAACT GAAAGTGAAA GTCCAGAAAC |
| 1501 | TGTTCCCACC TGCTGGAGTG AAGGGGCCAA GGAGGGTGAG TGCAAGGGGC GTGGGAGTGG |
| 1561 | CCTGAAGAGT CCTCTGAATG AACCTTCTGG CCTCCCACAG ACTCAAATGC TCAGACCAGC |
| 1621 | TCTTCCGAAA ACCAGGCCTT ATCTCCAAGA CCAGAGATAG TGGGGAGACT TCTTGGCTTG |
| 1681 | GTGAGGAAAA GCGGACATCA GCTGGTCAAA CAAACTCTCT GAACCCCTCC CTCCATCGTT |
| 1741 | TTCTTCACTG TCCTCCAAGC CAGCGGGAAT GGCAGCTGCC ACGCCGCCCT AAAAGCACAC |
| 1801 | TCATCCCCTC ACTTGCCGCG TCGCCCTCCC AGGCTCTCAA CAGGGGAGAG TGTGGTGTTT |
| 1861 | CCTGCAGGCC AGGCCAGCTG CCTCCGCGTG ATCAAAGCCA CACTCTGGGC TCCAGAGTGG |
| 1921 | GGATGACATG CACTCAGCTC TTGGCTCCAC TGGGATGGGA GGAGAGGACA AGGGAAATGT |
| 1981 | CAGGGGCGGG GAGGGTGACA GTGGCCGCCC AAGGCCCACG AGCTTGTTCT TTGTTCTTTG |
| 2041 | TCACAGGGAC TGAAAACCTC TCCTCATGTT CTGCTTTCGA TTCGTTAAGA GAGCAACATT |
| 2101 | TTACCCACAC ACAGATAAAG TTTTCCCTTG AGGAAACAAC AGCTTTAAAA GAAAAAGAAA |
| 2161 | AAAAAAGTCT TTGGTAAATG GCAAAAAAAA AAAAAAAAAA AAAAAAA. |

[0409] Exemplary gRNA spacer sequences of the disclosure that specifically bind to a target sequence of an RNA molecule encoding a CCR7 protein of the disclosure may comprise or consist of a nucleic acid having a sequence selected from any one of any one of SEQ ID NO: 12686 to SEQ ID NO: 14872.

[0410] Compositions of the disclosure may comprise a gRNA comprising a spacer sequence that specifically binds to a target sequence of an RNA molecule, wherein the spacer sequence and the target sequence are reverse complements of one another. In some embodiments, compositions of the disclosure may comprise a single (i.e., singular) gRNA comprising a) a first spacer sequence that specifically binds to a first target RNA sequence and b) a second spacer sequence that specifically binds to a second target RNA sequence, wherein the first and second spacer sequences each bind different target RNA sequences. In some embodiments, first and second spacer sequences which bind different target RNA sequences are not comprised within a single (i.e., singular) gRNA but rather a first spacer sequence is comprised within a first gRNA and a second spacer sequence is comprised within a second gRNA sequence. In some embodiments, a spacer sequence disclosed herein comprises a portion of a nucleic acid sequence encoding a protein component of the adaptive immune response, wherein the protein component is selected from the group consisting of Beta-2-microglobulin (β2M), Human Leukocyte Antigen A (HLA-A), Human Leukocyte Antigen B (HLA-B), Human Leukocyte Antigen C (HLA-C), Cluster of Differentiation 28 (CD28), Cluster of Differentiation 80 (CD80), Cluster of Differentiation 86 (CD86), Inducible T-cell Costimulator (ICOS), ICOS Ligand (ICOSLG), OX40L, Interleukin 12 (IL12), and CC Chemokine Receptor 7 (CCR7). In some embodiments, a spacer which is a portion of a nucleic acid sequence encoding a protein component of an adaptive immune response is about 20 or 21 nucleotides in length.

[0411] All nucleotide sequences of the disclosure may include a uracil (U) or a thymine (T) interchangeably.

[0412] Exemplary, non-limiting Zika NS5 targeting spacer sequences of sgRNAs include, but are not limited to: gcaatgatcttcatgttgggagc (SEQ ID NO: 196), gaaccttgttgatgaactcttc (SEQ ID NO: 197), gttggtgattagagcttcattc (SEQ ID NO: 198), and gagtgatcctcgttcaagaatcc (SEQ ID NO: 199).

[0413] Exemplary, non-limiting lambda NS5 targeting spacer sequences of sgRNAs include, but are not limited to: GTGATAAGTGGAATGCCATG (SEQ ID NO: 200) and GNNNNNNNNNNNNNNNNNNNNGUUUAAGAGCUAUGCUGGAAACAGCAUAGCAAG UUUAAAUAAGGCUAGUCCGUUAUCAACUUGAAAAAGUGGCACCGAGUCGGUGCU UUUUUU (SEQ ID NO: 201).

### Methods of Simultaneous Treatment of Disease and Prevention of Immune Response

[0414] The disclosure provides compostions and methods for the simultaneous treatment of a disease or disorder in a subject by delivering a gene therapy to a cell and prevention of an immune response to the cell receiving the gene therapy. For example, the composition shown in FIG. 4 may be administered to a subject wherein gRNA 1 binds to a target sequence within an RNA molecule that encodes a component of an adaptive immune response and gRNA2 binds to a target sequence within an RNA molecule associated with a disease or disorder. By targeting an RNA molecule that encodes a component of an adaptive immune response gRNA1 prevents the display of an antigen associated with the composition or a vector comprising the composition on the surface of the cell, thereby masking the cell from the subject's immune system. gRNA2 simultaneously targets a second RNA molecule to treat a disease or disorder of the disclosure.

[0415] In alternative embodiments, gRNA1 and gRNA2 of the composition shown in FIG. 4, for example, can each target a distinct RNA molecule encoding a component of the adaptive immune response. For example, while gRNA1 targets an RNA molecule encoding a β2M polypeptide, gRNA2 targets a costimulatory molecule (ICOSLG, CD80, CD86, OX40L, IL12 or CCR7).

[0416] In some embodiments, compositions of the disclosure may comprise or consist of at least 1, 2, 3, 4, 5, 6, 7, 8, 9, or 10 gRNAs.

[0417] In some embodiments, compositions of the disclosure may comprise or consist of at least 1, 2, 3, 4, 5, 6, 7, 8, 9, or 10 gRNAs, the expression of which is under the control of a constitutive promoter (e.g. U6) and a fusion protein comprising a first RNA binding protein and a second RNA binding protein, the expression of which fusion is under the control of a viral promoter, which may be optionally constitutive (e.g. EFS).

[0418] In some embodiments, compositions of the disclosure may comprise or consist of at least 1, 2, 3, 4, 5, 6, 7, 8, 9, or 10 gRNAs, the expression of which is under the control of a first promoter and a fusion protein comprising a first RNA binding protein and a second RNA binding protein, the expression of which fusion is under the control of a second promoter, wherein the first promoter drives stronger expression of at least 1, 2, 3, 4, 5, 6, 7, 8, 9, or 10 gRNAs that the second promoter drives expression of the fusion protein. In some embodiments, compositions of the disclosure may comprise or consist of at least 1, 2, 3, 4, 5, 6, 7, 8, 9, or 10 gRNAs, the expression of which is under the control of a first promoter and a fusion protein comprising a first RNA binding protein and a second RNA binding protein, the expression of which fusion is under the control of a second promoter, wherein the first promoter drives weaker expression of at least 1, 2, 3, 4, 5, 6, 7, 8, 9, or 10 gRNAs that the second promoter drives expression of the fusion protein. By varying the relative strength of the promoters driving expression of the gRNA versus fusion protein components of the compositions of the disclosure, the compositions may be provided in ratiometric doses while expressing the gRNA and fusion protein form the same vector. Thus, the compositions of the disclosure may comprise gRNAs that bind RNA molecules associated with two or more diseases as well as two or more components of an adaptive immune response. In some embodiments, the compositions of the disclosure may comprise fusion proteins disclosed herein, wherein at least one of the fusion partner proteins is an endonuclease such as, without limitation, RNAse1, RNAse4, RNAse6, RNAse7, RNAse8, RNAse2, RNAse6PL, RNAseL, RNAseT2, RNAse11, RNAseT2-like, NOB1, ENDOV, ENDOG, ENDOD1, hFEN1, hSLFN14, hLACTB2, APEX2, ANG, HRSP12, ZC3H12A, RIDA, PDL6, NTHL, KIAA0391, APEX1, AGO2, EXOG, ZC3H12D, ERN2, PELO, YBEY, CPSF4L, hCG_2002731, ERCC1, RAC1, RAA1, RAB1, DNA2, FLJ35220, FLJ13173, ERCC4, RNAse1(K41R), RNAse1(K41R, D121E), RNAse1(K41R, D121E, H119N), RNAse1(H119N), RNAse1(R39D, N67D, N88A, G89D, R91D, H119N), RNAse1(R39D, N67D, N88A, G89D, R91D, H119N, K41R, D121E), RNAse1(R39D, N67D, N88A, G89D, R91D), TENM1, TENM2, RNAseK, TALEN, ZNF638, or PIN of hSMG6.

### Methods of Use

[0419] The disclosure provides a method of modifying level of expression of an RNA molecule of the disclosure or a protein encoded by the RNA molecule comprising contacting the composition and the RNA molecule under conditions suitable for binding of one or more of the guide RNA or the fusion protein (or a portion thereof) to the RNA molecule.

[0420] The disclosure provides a method of modifying an activity of a protein encoded by an RNA molecule comprising contacting the composition and the RNA molecule under conditions suitable for binding of one or more of the guide RNA or the fusion protein (or a portion thereof) to the RNA molecule.

[0421] The disclosure provides a method of modifying level of expression of an RNA molecule of the disclosure or a protein encoded by the RNA molecule comprising contacting the composition and a cell comprising the RNA molecule under conditions suitable for binding of one or more of the guide RNA or the fusion protein (or a portion thereof) to the RNA molecule. In some embodiments, the cell is in vivo, in vitro, ex vivo or in situ. In some embodiments, the composition comprises a vector comprising composition comprising a guide RNA of the disclosure and a fusion protein of the disclosure. In some embodiments, the vector is an AAV.

[0422] The disclosure provides a method of modifying an activity of a protein encoded by an RNA molecule comprising contacting the composition and a cell comprising the RNA molecule under conditions suitable for binding of one or more of the guide RNA or the fusion protein (or a portion thereof) to the RNA molecule. In some embodiments, the cell is in vivo, in vitro, ex vivo or in situ. In some embodiments, the composition comprises a vector comprising composition comprising a guide RNA of the disclosure and a fusion protein of the disclosure. In some embodiments, the vector is an AAV.

[0423] The disclosure provides a method of modifying level of expression of an RNA molecule of the disclosure or a protein encoded by the RNA molecule comprising contacting the composition and the RNA molecule under conditions suitable for RNA nuclease activity wherein the fusion protein induces a break in the RNA molecule.

[0424] The disclosure provides a method of modifying an activity of a protein encoded by an RNA molecule comprising contacting the composition and the RNA molecule under conditions suitable for RNA nuclease activity wherein the fusion protein induces a break in the RNA molecule.

[0425] The disclosure provides a method of modifying a level of expression of an RNA molecule of the disclosure or a protein encoded by the RNA molecule comprising contacting the composition and a cell comprising the RNA molecule under conditions suitable for RNA nuclease activity wherein the fusion protein induces a break in the RNA molecule. In some embodiments, the cell is in vivo, in vitro, ex vivo or in situ. In some embodiments, the composition comprises a vector comprising composition comprising a guide RNA of the disclosure and a fusion protein of the disclosure. In some embodiments, the vector is an AAV.

[0426] The disclosure provides a method of modifying an activity of a protein encoded by an RNA molecule comprising contacting the composition and a cell comprising the RNA molecule under conditions suitable for RNA nuclease activity wherein the fusion protein induces a break in the RNA molecule. In some embodiments, the cell is in vivo, in vitro, ex vivo or in situ. In some embodiments, the composition comprises a vector comprising composition comprising a guide RNA of the disclosure and a fusion protein of the disclosure. In some embodiments, the vector is an AAV.

[0427] The disclosure provides a method of treating a disease or disorder comprising administering to a subject a therapeutically effective amount of a composition of the disclosure.

[0428] The disclosure provides a method of treating a disease or disorder comprising administering to a subject a therapeutically effective amount of a composition of the disclosure, wherein the composition comprises a vector comprising composition comprising a guide RNA of the disclosure and a fusion protein of the disclosure and wherein the composition modifies a level of expression of an RNA molecule of the disclosure or a protein encoded by the RNA molecule.

[0429] The disclosure provides a method of treating a disease or disorder comprising administering to a subject a therapeutically effective amount of a composition of the disclosure, wherein the composition comprises a vector comprising composition comprising a guide RNA of the disclosure and a fusion protein of the disclosure and wherein the composition modifies an activity of a protein encoded by an RNA molecule.

[0430] In some embodiments of the compositions and methods of the disclosure, a disease or disorder of the disclosure includes, but is not limited to, a genetic disease or disorder. In some embodiments, the genetic disease or disorder is a single-gene disease or disorder. In some embodiments, the single-gene disease or disorder is an autosomal dominant disease or disorder, an autosomal recessive disease or disorder, an X-chromosome linked (X-linked) disease or disorder, an X-linked dominant disease or disorder, an X-linked recessive disease or disorder, a Y-linked disease or disorder or a mitochondrial disease or disorder. In some embodiments, the genetic disease or disorder is a multiple-gene disease or disorder. In some embodiments, the genetic disease or disorder is a multiple-gene disease or disorder. In some embodiments, the single-gene disease or disorder is an autosomal dominant disease or disorder including, but not limited to, Huntington's disease, neurofibromatosis type 1, neurofibromatosis type 2, Marfan syndrome, hereditary nonpolyposis colorectal cancer, hereditary multiple exostoses, Von Willebrand disease, and acute intermittent porphyria. In some embodiments, the single-gene disease or disorder is an autosomal recessive disease or disorder including, but not limited to, Albinism, Medium-chain acyl-CoA dehydrogenase deficiency, cystic fibrosis, sickle-cell disease, Tay-Sachs disease, Niemann-Pick disease, spinal muscular atrophy, and Roberts syndrome. In some embodiments, the single-gene disease or disorder is X-linked disease or disorder including, but not limited to, muscular dystrophy, Duchenne muscular dystrophy, Hemophilia, Adrenoleukodystrophy (ALD), Rett syndrome, and Hemophilia A. In some embodiments, the single-gene disease or disorder is a mitochondrial disorder including, but not limited to, Leber's hereditary optic neuropathy.

[0431] In some embodiments of the compositions and methods of the disclosure, a disease or disorder of the disclosure includes, but is not limited to, an immune disease or disorder. In some embodiments, the immune disease or disorder is an immunodeficiency disease or disorder including, but not limited to, B-cell deficiency, T-cell deficiency, neutropenia, asplenia, complement deficiency, acquired immunodeficiency syndrome (AIDS) and immunodeficiency due to medical intervention (immunosuppression as an intended or adverse effect of a medical therapy). In some embodiments, the immune disease or disorder is an autoimmune disease or disorder including, but not limited to, Achalasia, Addison's disease, Adult Still's disease, Agammaglobulinemia, Alopecia areata, Amyloidosis, Anti-GBM/Anti-TBM nephritis, Antiphospholipid syndrome, Autoimmune angioedema, Autoimmune dysautonomia, Autoimmune encephalomyelitis, Autoimmune hepatitis, Autoimmune inner ear disease (AIED), Autoimmune myocarditis, Autoimmune oophoritis, Autoimmune orchitis, Autoimmune pancreatitis, Autoimmune retinopathy, Autoimmune urticaria, Axonal & neuronal neuropathy (AMAN), Bald disease, Behcet's disease, Benign mucosal pemphigoid, Bullous pemphigoid, Castleman disease (CD), Celiac disease, Chagas disease, Chronic inflammatory demyelinating polyneuropathy (CIDP), Chronic recurrent multifocal osteomyelitis (CRMO), Churg-Strauss Syndrome (CSS) or Eosinophilic Granulomatosis (EGPA), Cicatricial pemphigoid, Cogan's syndrome, Cold agglutinin disease, Congenital heart block, Coxsackie myocarditis, CREST syndrome, Crohn's disease, Dermatitis herpetiformis, Dermatomyositis, Devic's disease (neuromyelitis optica), Discoid lupus, Dressler's syndrome, Endometriosis, Eosinophilic esophagitis (EoE), Eosinophilic fasciitis, Erythema nodosum, Essential mixed cryoglobulinemia, Evans syndrome, Fibromyalgia, Fibrosing alveolitis, Giant cell arteritis (temporal arteritis), Giant cell myocarditis, Glomerulonephritis, Goodpasture's syndrome, Granulomatosis with Polyangiitis, Graves' disease, Guillain-Barre syndrome, Hashimoto's thyroiditis, Hemolytic anemia, Henoch-Schonlein purpura (HSP), Herpes gestationis or pemphigoid gestationis (PG), Hidradenitis Suppurativa (HS) (Acne Inversa), Hypogammalglobulinemia, IgA Nephropathy, IgG4-related sclerosing disease, Immune thrombocytopenic purpura (ITP), Inclusion body myositis (IBM), Interstitial cystitis (IC), Juvenile arthritis, Juvenile diabetes (Type 1 diabetes), Juvenile myositis (JM), Kawasaki disease, Lambert-Eaton syndrome, Leukocytoclastic vasculitis, Lichen planus, Lichen sclerosus, Ligneous conjunctivitis, Linear IgA disease (LAD), Lupus, Lyme disease chronic, Meniere's disease, Microscopic polyangiitis (MPA), Mixed connective tissue disease (MCTD), Mooren's ulcer, Mucha-Habermann disease, Multifocal Motor Neuropathy (MMN) or MMNCB, Multiple sclerosis, Myasthenia gravis, Myositis, Narcolepsy, Neonatal Lupus, Neuromyelitis optica, Neutropenia, Ocular cicatricial pemphigoid, Optic neuritis, Palindromic rheumatism (PR), PANDAS, Paraneoplastic cerebellar degeneration (PCD), Paroxysmal nocturnal hemoglobinuria (PNH), Parry Romberg syndrome, Pars planitis (peripheral uveitis), Parsonnage-Turner syndrome, Pemphigus, Peripheral neuropathy, Perivenous encephalomyelitis, Pernicious anemia (PA), POEMS syndrome, Polyarteritis nodosa, Polyglandular syndromes type I, II, III, Polymyalgia rheumatica, Polymyositis, Postmyocardial infarction syndrome, Postpericardiotomy syndrome, Primary biliary cirrhosis, Primary sclerosing cholangitis, Progesterone dermatitis, Psoriasis, Psoriatic arthritis, Pure red cell aplasia (PRCA), Pyoderma gangrenosum, Raynaud's phenomenon, Reactive Arthritis, Reflex sympathetic dystrophy, Relapsing polychondritis, Restless legs syndrome (RLS), Retroperitoneal fibrosis, Rheumatic fever, Rheumatoid arthritis, Sarcoidosis, Schmidt syndrome, Scleritis, Scleroderma, Sjagren's syndrome, Sperm & testicular autoimmunity, Stiff person syndrome (SPS), Subacute bacterial endocarditis (SBE), Susac's syndrome, Sympathetic ophthalmia (SO), Takayasu's arteritis, Temporal arteritis/Giant cell arteritis, Thrombocytopenic purpura (TTP), Tolosa-Hunt syndrome (THS), Transverse myelitis, Type 1 diabetes, Ulcerative colitis (UC), Undifferentiated connective tissue disease (UCTD), Uveitis, Vasculitis, Vitiligo, Vogt-Koyanagi-Harada Disease, or Wegener's granulomatosis.

[0432] In some embodiments of the compositions and methods of the disclosure, a disease or disorder of the disclosure includes, but is not limited to, an inflammatory disease or disorder. In some embodiments, the inflammatory disease or disorder includes, but is not limited to, Alzheimer's disease, ankylosing spondylitis, arthritis, osteoarthritis, rheumatoid arthritis, psoriatic arthritis, asthma, atherosclerosis, Crohn's disease, colitis, dermatitis, diverticulitis, fibromyalgia, hepatitis, irritable bowel syndrome (IBS), systemic lupus erythematous (SLE), nephritis, Parkinson's disease, ulcerative colitis, acute bronchitis, acute appendicitis, tonsillitis, infective meningitis, sinusitis, asthma, chronic peptic ulcer, tuberculosis, rheumatoid arthritis, periodontitis, gout, Scleroderma, vasculitis, and myositis.

[0433] In some embodiments of the compositions and methods of the disclosure, a disease or disorder of the disclosure includes, but is not limited to, a metabolic disease or disorder. In some embodiments of the compositions and methods of the disclosure, a disease or disorder of the disclosure includes, but is not limited to, a degenerative or a progressive disease or disorder. In some embodiments, the degenerative or a progressive disease or disorder includes, but is not limited to, amyotrophic lateral sclerosis (ALS), Huntington's disease, Alzheimer's disease, and aging.

[0434] In some embodiments of the compositions and methods of the disclosure, a disease or disorder of the disclosure includes, but is not limited to, an infectious disease or disorder.

[0435] In some embodiments of the compositions and methods of the disclosure, a disease or disorder of the disclosure includes, but is not limited to, a pediatric or a developmental disease or disorder.

[0436] In some embodiments of the compositions and methods of the disclosure, a disease or disorder of the disclosure includes, but is not limited to, a cardiovascular disease or disorder.

[0437] In some embodiments of the compositions and methods of the disclosure, a disease or disorder of the disclosure includes, but is not limited to, a proliferative disease or disorder. In some embodiments, the proliferative disease or disorder is a cancer. In some embodiments, the cancer includes, but is not limited to, Acute Lymphoblastic Leukemia (ALL), Acute Myeloid Leukemia (AML), Adrenocortical Carcinoma, AIDS-Related Cancers, Kaposi Sarcoma (Soft Tissue Sarcoma), AIDS-Related Lymphoma (Lymphoma), Primary CNS Lymphoma (Lymphoma), Anal Cancer, Appendix Cancer, Gastrointestinal Carcinoid Tumors, Astrocytomas, Atypical Teratoid/Rhabdoid Tumor, Central Nervous System (Brain Cancer), Basal Cell Carcinoma, Bile Duct Cancer, Bladder Cancer, Bone Cancer, Ewing Sarcoma, Osteosarcoma, Malignant Fibrous Histiocytoma, Brain Tumors, Breast Cancer, Burkitt Lymphoma, Carcinoid Tumor, Carcinoma, Cardiac (Heart) Tumors, Embryonal Tumors, Germ Cell Tumor, Primary CNS Lymphoma, Cervical Cancer, Cholangiocarcinoma, Chordoma, Chronic Lymphocytic Leukemia (CLL), Chronic Myelogenous Leukemia (CML), Chronic Myeloproliferative Neoplasms, Colorectal Cancer, Craniopharyngioma, Cutaneous T-Cell Lymphoma, Ductal Carcinoma In Situ, Embryonal Tumors, Endometrial Cancer (Uterine Cancer), Ependymoma, Esophageal Cancer, Esthesioneuroblastoma (Head and Neck Cancer), Ewing Sarcoma (Bone Cancer), Extracranial Germ Cell Tumor, Extragonadal Germ Cell Tumor, Eye Cancer, Childhood Intraocular Melanoma, Intraocular Melanoma, Retinoblastoma, Fallopian Tube Cancer, Fibrous Histiocytoma of Bone, Malignant, and Osteosarcoma, Gallbladder Cancer, Gastric (Stomach) Cancer, Gastrointestinal Carcinoid Tumor, Gastrointestinal Stromal Tumors (GIST) (Soft Tissue Sarcoma), Childhood Gastrointestinal Stromal Tumors, Germ Cell Tumors, Childhood Extracranial Germ Cell Tumors, Extragonadal Germ Cell Tumors, Ovarian Germ Cell Tumors, Testicular Cancer, Gestational Trophoblastic Disease, Hairy Cell Leukemia, Head and Neck Cancer, Heart Tumors, Hepatocellular (Liver) Cancer, Histiocytosis, Hodgkin Lymphoma, Hypopharyngeal Cancer (Head and Neck Cancer), Intraocular Melanoma, Islet Cell Tumors, Pancreatic Neuroendocrine Tumors, Kaposi Sarcoma (Soft Tissue Sarcoma), Kidney (Renal Cell) Cancer, Langerhans Cell Histiocytosis, Laryngeal Cancer (Head and Neck Cancer), Leukemia, Lip and Oral Cavity Cancer (Head and Neck Cancer), Liver Cancer, Lung Cancer (Non-Small Cell and Small Cell), Childhood Lung Cancer, Lymphoma, Male Breast Cancer, Malignant Fibrous Histiocytoma of Bone and Osteosarcoma, Melanoma, Merkel Cell Carcinoma (Skin Cancer), Mesothelioma, Metastatic Squamous Neck Cancer with Occult Primary (Head and Neck Cancer), Midline Tract Carcinoma With NUT Gene Changes, Mouth Cancer (Head and Neck Cancer), Multiple Endocrine Neoplasia Syndromes, Multiple Myeloma/Plasma Cell Neoplasms, Mycosis Fungoides (Lymphoma), Myelodysplastic Syndromes, Myelodysplastic/Myeloproliferative Neoplasms, Nasal Cavity and Paranasal Sinus Cancer (Head and Neck Cancer), Nasopharyngeal Cancer (Head and Neck Cancer), Neuroblastoma, Non-Hodgkin Lymphoma, Non-Small Cell Lung Cancer, Oral Cancer, Lip and Oral Cavity Cancer and Oropharyngeal Cancer, Osteosarcoma and Malignant Fibrous Histiocytoma of Bone, Ovarian Cancer, Pancreatic Cancer, Pancreatic Neuroendocrine Tumors (Islet Cell Tumors), Papillomatosis, Paraganglioma, Parathyroid Cancer, Penile Cancer, Pharyngeal Cancer (Head and Neck Cancer), Pheochromocytoma, Plasma Cell Neoplasm/Multiple Myeloma, Pleuropulmonary Blastoma, Pregnancy and Breast Cancer, Primary Central Nervous System (CNS) Lymphoma, Primary Peritoneal Cancer, Prostate Cancer, Rectal Cancer, Recurrent Cancer, Renal Cell (Kidney) Cancer, Retinoblastoma, Rhabdomyosarcoma, Childhood (Soft Tissue Sarcoma), Salivary Gland Cancer (Head and Neck Cancer), Sarcoma, Childhood Rhabdomyosarcoma (Soft Tissue Sarcoma), Childhood Vascular Tumors (Soft Tissue Sarcoma), Ewing Sarcoma (Bone Cancer), Kaposi Sarcoma (Soft Tissue Sarcoma), Osteosarcoma (Bone Cancer), Uterine Sarcoma, Sézary Syndrome, Lymphoma, Skin Cancer, Small Cell Lung Cancer, Small Intestine Cancer, Soft Tissue Sarcoma, Squamous Cell Carcinoma of the Skin, Squamous Neck Cancer, Stomach (Gastric) Cancer, T-Cell Lymphoma, Testicular Cancer, Throat Cancer (Head and Neck Cancer), Nasopharyngeal Cancer, Oropharyngeal Cancer, Hypopharyngeal Cancer, Thymoma and Thymic Carcinoma, Thyroid Cancer, Transitional Cell Cancer of the Renal Pelvis and Ureter, Renal Cell Cancer, Urethral Cancer, Uterine Sarcoma, Vaginal Cancer, Vascular Tumors (Soft Tissue Sarcoma), Vulvar Cancer, Wilms Tumor and Other Childhood Kidney Tumors.

[0438] In some embodiments of the methods of the disclosure, a subject of the disclosure has been diagnosed with the disease or disorder. In some embodiments, the subject of the disclosure presents at least one sign or symptom of the disease or disorder. In some embodiments, the subject has a biomarker predictive of a risk of developing the disease or disorder. In some embodiments, the biomarker is a genetic mutation.

[0439] In some embodiments of the methods of the disclosure, a subject of the disclosure is female. In some embodiments of the methods of the disclosure, a subject of the disclosure is male. In some embodiments, a subject of the disclosure has two XX or XY chromosomes. In some embodiments, a subject of the disclosure has two XX or XY chromosomes and a third chromosome, either an X or a Y.

[0440] In some embodiments of the methods of the disclosure, a subject of the disclosure is a neonate, an infant, a child, an adult, a senior adult, or an elderly adult. In some embodiments of the methods of the disclosure, a subject of the disclosure is at least 1, 2, 3, 4, 5, 6, 7, 8, 9, 10, 11, 12, 13, 14, 15, 16, 17, 18, 19, 20, 21, 22, 23, 24, 25, 26, 27, 28, 29, 30 or 31 days old. In some embodiments of the methods of the disclosure, a subject of the disclosure is at least 1, 2, 3, 4, 5, 6, 7, 8, 9, 10, 11 or 12 months old. In some embodiments of the methods of the disclosure, a subject of the disclosure is at least 1, 2, 3, 4, 5, 6, 7, 8, 9, 10, 15, 20, 25, 30, 35, 40, 45, 50, 55, 60, 65, 70, 75, 80, 85, 90, 95, 100 or any number of years or partial years in between of age.

[0441] In some embodiments of the methods of the disclosure, a subject of the disclosure is a mammal. In some embodiments, a subject of the disclosure is a non-human mammal.

[0442] In some embodiments of the methods of the disclosure, a subject of the disclosure is a human.

[0443] In some embodiments of the methods of the disclosure, a therapeutically effective amount comprises a single dose of a composition of the disclosure. In some embodiments, a therapeutically effective amount comprises a therapeutically effective amount comprises at least one dose of a composition of the disclosure. In some embodiments, a therapeutically effective amount comprises a therapeutically effective amount comprises one or more dose(s) of a composition of the disclosure.

[0444] In some embodiments of the methods of the disclosure, a therapeutically effective amount eliminates a sign or symptom of the disease or disorder. In some embodiments, a therapeutically effective amount reduces a severity of a sign or symptom of the disease or disorder.

[0445] In some embodiments of the methods of the disclosure, a therapeutically effective amount eliminates the disease or disorder.

[0446] In some embodiments of the methods of the disclosure, a therapeutically effective amount prevents an onset of a disease or disorder. In some embodiments, a therapeutically effective amount delays the onset of a disease or disorder. In some embodiments, a therapeutically effective amount reduces the severity of a sign or symptom of the disease or disorder. In some embodiments, a therapeutically effective amount improves a prognosis for the subject.

[0447] In some embodiments of the methods of the disclosure, a composition of the disclosure is administered to the subject systemically. In some embodiments, the composition of the disclosure is administered to the subject by an intravenous route. In some embodiments, the composition of the disclosure is administered to the subject by an injection or an infusion.

[0448] In some embodiments of the methods of the disclosure, a composition of the disclosure is administered to the subject locally. In some embodiments, the composition of the disclosure is administered to the subject by an intraosseous, intraocular, intracerebrospinal or intraspinal route. In some embodiments, the composition of the disclosure is administered directly to the cerebral spinal fluid of the central nervous system. In some embodiments, the composition of the disclosure is administered directly to a tissue or fluid of the eye and does not have bioavailability outside of ocular structures. In some embodiments, the composition of the disclosure is administered to the subject by an injection or an infusion.

[0449] In some embodiments, the compositions comprising the RNA-binding fusion proteins disclosed herein are formulated as pharmaceutical compositions. Briefly, pharmaceutical compositions for use as disclosed herein may comprise a fusion protein(s) or a polynucleotide encoding the fusion protein(s), optionally comprised in an AAV, which is optionally also immune orthogonal, in combination with one or more pharmaceutically or physiologically acceptable carriers, diluents or excipients. Such compositions may comprise buffers such as neutral buffered saline, phosphate buffered saline and the like; carbohydrates such as glucose, mannose, sucrose or dextrans, mannitol; proteins; polypeptides or amino acids such as glycine; antioxidants; chelating agents such as EDTA or glutathione; adjuvants (e.g., aluminum hydroxide); and preservatives. Compositions of the disclosure may be formulated for oral, intravenous, topical, enteral, intraocular, and/or parenteral administration. In certain embodiments, the compositions of the present disclosure are formulated for intravenous administration.

### EXAMPLES

### Example 1: RNA-Guided Cleavage of Viral RNA Molecules

[0450] A549 cells were cultured in DMEM with 10% FBS and 1% penicillin/streptomycin (GIBCO) and passaged at 90%-100% confluency. Cells were seeded at 1×10\hat{ }5 cells per well of a 24-well plate for RNA isolation or 0.5×10\hat{ }5 cells per well. Cells were transfected with plasmids encoding Campylobacter jejuni Cas9 (CjeCas9) fused to the gene NTHL1 (residues 31-312, E43) or CPSF4L (full length, E67) with plasmids encoding one of four sites in Zika NS5 RNA. CjeCas9 was driven by an EFS promoter while the guide RNAs were driven by U6 promoter. The sequences of the sgRNAs are presented in Table 8. The sequences of the constructs used in this stud are presented below (SEQ ID NO: 13656 and SEQ ID NO: 13657).

[0451] RNA isolations were carried out with RNAeasy columns (Qiagen) according to the manufacturer's protocol. RNA quality and concentrations were estimated using the Nanodrop spectrophotometer. cDNA preparation was done using Superscript III (Thermo) with random primers according to the manufacturer's protocol. qPCR was carried out with the following primers as listed in Table 7.

[0452] FIG. 1 shows expression levels of Zika NS5 assessed in the presence of both E43 and E67 endonucleases with sgRNAs containing the various NS5-targeting spacer sequences as indicated in Table 8. Zika NS5 expression is displayed as fold change relative to the endonuclease loaded with an sgRNA containing a control (Lambda) spacer sequence.

[0453] Immunofluorescence microscopy was used to visualize Zika NS5 expression in the presence of E43 or E67 endonucleases fused to CjeCas9. FIG. 2A shows a fluorescence microscopy image of cells transfected with CjeCas9-endonuclease fusions loaded with an sgRNA containing a Zika NS5-targeting spacer sequence. Expression of Zika NS5 is markedly decreased in the presence of CjeCas9-endonuclease fusions loaded with the appropriate Zika NS5-targeting sgRNA as compared to a CjeCas9-endonuclease fusion loaded with a non-Zika NS5 targeting sgRNA (FIGS. 2A and 2B). FIG. 3 is a list of exemplary endonucleases for use in the compositions of the disclosure.

TABLE 7
qPCR primers

| | |
|---|---|
| GAPDH_F | CAGCCTCAAGATCATCAGCAA (SEQ ID NO: 192) |
| GAPDH_R | TGTGGTCATGAGTCCTTCCA (SEQ ID NO: 193) |
| NS5_F | GAGGAGAGTGCCAGAGTTGT (SEQ ID NO: 194) |
| NS5_R | TCTCTCTCCCCATCCAGTGA (SEQ ID NO: 195) |

TABLE 8
sgRNA sequences

| | |
|---|---|
| NS5-targeting spacer 1 | gcaatgatcttcatgttgggagc (SEQ ID NO: 196) |
| NS5-targeting spacer 2 | gaaccttgttgatgaactcttc (SEQ ID NO: 197) |
| NS5-targeting spacer 3 | gttggtgattagagcttcattc (SEQ ID NO: 198) |
| NS5-targeting spacer 4 | gagtgatcctcgttcaagaatcc (SEQ ID NO: 199) |
| Non-targeting control | GTGATAAGTGGAATGCCATG (SEQ ID NO: 200) |
| spacer (λ2) | |
| sgRNA scaffold (N's | GNNNNNNNNNNNNNNNNNNNNGUUUAAGAGCUAUG |
| indicate spacer) | CUGGAAACAGCAUAGCAAGUUUAAAUAAGGCUAGU |
| | CCGUUAUCAACUUGAAAAAGUGGCACCGAGUCGGU |
| | GCUUUUUUU (SEQ ID NO: 201) |

[0454] A E43-CjeCas9 and sgRNA plasmid may comprise or consist of the sequence (U6: N's=sgRNA spacer, E43, CjeCas9):

(SEQ ID NO: 202)
gtttattacagggacagcagagatccagtttggttaattaaggtaccgag
ggcctatttcccatgattccttcatatttgcatatacgatacaaggctgt
tagagagataattagaattaatttgactgtaaacacaaagatattagtac
aaaatacgtgacgtagaaagtaataatttcttgggtagtttgcagtttta
aaattatgttttaaaatggactatcatatgcttaccgtaacttgaaagta
tttcgatttcttggctttatatatcttGTGGAAAGGACGAAACACCNNNN
NNNNNNNNNNNNNNNGTTTTAGTCCCTGAAGGGACTAAAATAAAGAGTTT
GCGGGACTCTGCGGGGTTACAATCCCCTAAAACCGCTTTTTTTCCTGCAG
CCCGGGGGATCCACTAGTTCTAGAGCGGCCGCCACCGCGGTGGAGCTCCA
GCTTTTGTTCCCTTTAGTGAGGGTTAATTGCGCGAATTCGCTAGCTAGGT
CTTGAAAGGAGTGGGAATTGGCTCCGGTGCCCGTCAGTGGGCAGAGCGCA
CATCGCCCACAGTCCCCGAGAAGTTGGGGGGAGGGGTCGGCAATTGATCC
GGTGCCTAGAGAAGGTGGCGCGGGGTAAACTGGGAAAGTGATGTCGTGTA
CTGGCTCCGCCTTTTTCCCGAGGGTGGGGGAGAACCGTATATAAGTGCAG
TAGTCGCCGTGAACGTTCTTTTTCGCAACGGGTTTGCCGCCAGAACACAG
GACCGGTTCTAGAGCGCTATTTAGAACCatgTGTTCTCCCCAAGAATCTG
GCATGACCGCTCTTTCAGCGAGGATGTTGACGCGAAGCAGATCCCTGGGA
CCTGGGGCCGGGCCACGAGGGTGTCGGGAAGAACCAGGACCGTTGCGACG
GAGGGAAGCAGCAGCGGAAGCTCGGAAATCCCATTCTCCGGTTAAACGAC
CCCGCAAGGCACAACGGCTCAGGGTTGCTTACGAGGGGAGCGATTCCGAA
AAGGGTGAAGGAGCAGAGCCCTTGAAGGTTCCAGTATGGGAACCCCAGGA
TTGGCAGCAGCAGCTTGTAAACATCCGAGCAATGAGGAACAAAAAAGATG
CACCTGTTGATCACCTCGGAACCGAACATTGTTATGATTCTAGTGCGCCG
CCAAAAGTCCGCCGGTATCAGGTTCTGTTGAGTTTGATGCTGAGTAGTCA
GACTAAGGACCAGGTTACGGCCGGAGCAATGCAACGGCTTCGGGCACGGG
GACTCACGGTCGATAGCATTTTGCAGACCGATGACGCAACATTGGGTAAA
CTCATATATCCAGTTGGCTTCTGGCGGAGCAAAGTGAAGTACATCAAGCA
GACCTCAGCCATTCTCCAACAACATTACGGAGGTGATATACCCGCAAGCG
TAGCTGAACTGGTAGCACTGCCGGGCGTCGGTCCCAAAATGGCACATCTG
GCTATGGCGGTTGCTTGGGGAACGGTGTCTGGTATCGCAGTTGATACGCA
TGTCCACCGCATCGCCAATCGGCTGAGGTGGACTAAAAAAGCCACTAAGT
CTCCTGAAGAAACACGGGCTGCTCTGGAAGAGTGGCTTCCACGAGAGCTG
TGGCATGAAATCAATGGATTGCTGGTTGGTTTCGGGCAGCAGACATGCTT
GCCCGTGCACCCCCGGTGTCATGCTTGCTTGAACCAGGCTTTGTGCCCAG
CTGCCCAGGGCCTGAGTGGAAGTGAGACACCGGGAACATCTGAGTCTGCG
ACCCCGGAGAGCacaaacGCGCGAATCCTGGCCTTCGcgATTGGCATTAG
CAGCATCGGCTGGGCATTCTCTGAAAACGACGAACTGAAGGATTGCGGCG
TGCGAATTTTCACTAAGGTCGAAAATCCCAAAACTGGTGAATCACTCGCT
CTCCCTAGACGACTGGCACGCTCCGCACGAAAGAGGCTTGCCCGCCGCAA
GGCACGCTTGAACCATCTTAAACACCTTATTGCAAATGAGTTTAAACTGA
ATTATGAGGACTACCAATCCTTTGACGAGTCTCTTGCTAAAGCCTACAAA
GGGAGCCTTATATCCCCGTATGAGCTCCGGTTCAGAGCACTCAACGAACT
GCTGTCCAAACAGGATTTTGCTCGCGTGATTCTCCACATAGCGAAGAGGC
GAGGATACGATGACATTAAAAACAGTGATGATAAGGAAAAAGGGGCCATA
CTCAAAGCGATTAAGCAAAATGAAGAGAAGCTCGCTAACTATCAATCAGT
AGGGGAGTATCTCTATAAAGAGTACTTCCAGAAGTTCAAAGAAAATAGCA
AGGAATTTACTAATGTCCGGAATAAAAAGGAGTCTTACGAAAGATGTATT
GCGCAATCTTTCCTCAAGGACGAGCTCAAATTGATTTTCAAGAAACAAAG
GGAATTTGGGTTCAGCTTCTCAAAAAAATTTGAGGAAGAGGTTCTGAGCG
TTGCCTTTTACAAACGCGCCCTTAAGGACTTCTCACATCTCGTAGGGAAT
TGTAGTTTCTTCACCGATGAAAAACGGGCGCCAAAAAATAGCCCTTTGGC
TTTTATGTTTGTCGCTCTGACTCGCATCATTAATCTGCTCAACAACCTTA
AAAACACGGAAGGGATTCTGTACACAAAGGATGATCTGAACGCTCTGCTT
AACGAAGTTTTGAAGAACGGGACTTTGACCTACAAACAAACCAAAAAGCT
TCTTGGTCTCAGTGATGACTACGAATTCAAGGGAGAAAAAGGGACATATT
TCATCGAATTCAAGAAGTATAAGGAGTTCATCAAAGCCTTGGGCGAGCAC
AACTTGTCTCAAGATGATCTCAACGAAATTGCTAAGGATATCACTCTGAT
TAAAGACGAGATCAAGCTCAAAAAGGCGTTGGCGAAGTATGACCTTAACC
AAAACCAAATAGATAGCCTCAGCAAGTTGGAATTTAAAGATCACTTGAAT
ATAAGTTTCAAGGCCCTTAAGTTGGTCACCCCCTTGATGCTTGAAGGAAA
GAAATATGATGAGGCATGTAATGAGCTGAATCTCAAGGTTGCTATTAACG
AAGACAAAAAAGATTTCCTCCCAGCTTTCAATGAGACTTACTATAAGGAC
GAGGTTACCAATCCTGTGGTGCTCCGAGCCATCAAAGAGTATCGAAAGGT
CCTGAATGCTTTGCTCAAAAAATACGGTAAGGTACACAAAATAAATATTG
AGCTCGCAAGGGAGGTCGGTAAGAACCACTCCCAGCGCGCCAAAATAGAA
AAGGAACAGAATGAAAATTACAAAGCGAAAAAGGACGCCGAGCTCGAGTG
CGAAAAGCTGGGCCTGAAAATAAACAGCAAGAACATTCTCAAACTCCGCC
TCTTCAAAGAACAAAAAGAATTTTGTGCTTATAGTGGTGAGAAAATAAAA
ATCTCCGATCTTCAAGACGAGAAGATGCTCGAAATAGACgcgATATATCC
ATATAGCAGGTCTTTTGACGATTCTTACATGAATAAAGTGCTTGTTTTCA
CTAAGCAGAATCAGGAAAAGTTGAATCAGACCCCCTTTGAGGCCTTTGGC
AACGACTCAGCAAAGTGGCAGAAGATCGAGGTCTTGGCTAAGAATCTTCC
TACTAAGAAACAGAAAAGGATATTGGATAAGAACTATAAAGACAAAGAAC
AAAAGAACTTTAAAGACCGCAACCTCAATGACACCAGATACATAGCAAGA
TTGGTTCTGAACTACACAAAAGATTATTTGGACTTCTTGCCGCTGTCTGA
TGATGAGAACACGAAACTCAACGACACGCAAAAGGGGTCTAAAGTCCACG
TCGAAGCTAAATCTGGGATGCTCACCTCAGCATTGAGGCATACGTGGGGA
TTCTCAGCAAAGGACCGAAACAATCACCTGCACCATGCCATTGACGCAGT
TATCATAGCGTATGCCAATAATTCAATAGTAAAAGCGTTTAGCGACTTCA
AGAAGGAACAAGAGTCCAACAGCGCCGAGCTCTACGCAAAAAAGATTAGT
GAACTCGACTACAAAAACAAAAGAAAATTCTTTGAGCCGTTCAGCGGATT
TCGACAGAAGGTATTGGATAAAATAGATGAAATTTTCGTGAGCAAACCCG
AAAGGAAAAAGCCCTCAGGCGCCTTGCACGAAGAGACTTTCAGGAAGGAA
GAGGAATTCTACCAAAGCTACGGCGGAAAAGAGGGAGTTTTGAAGGCTCT
CGAACTTGGAAAGATTAGGAAGGTGAACGGCAAGATAGTGAAAAACGGCG
ATATGTTCCGGGTTGATATCTTCAAACATAAAAAAACGAATAAATTTTAT
GCTGTGCCTATATACACTATGGACTTCGCACTTAAGGTCCTGCCGAATAA
GGCGGTAGCCCGATCTAAAAAAGGCGAAATTAAGGACTGGATTTTGATGG
ATGAAAATTACGAGTTCTGCTTTTCTCTCTACAAGGATTCCCTTATATTG
ATACAGACGAAAGATATGCAGGAACCGGAATTCGTGTATTACAACGCTTT
TACTTCCTCTACGGTATCTTTGATTGTCTCCAAACATGACAACAAATTCG
AAACACTCAGTAAAAACCAAAAGATTCTCTTTAAAAATGCGAACGAGAAA
GAAGTAATTGCAAAATCAATTGGCATCCAAAATTTGAAAGTTTTTGAAAA
ATATATAGTATCTGCCCTCGGAGAGGTTACTAAAGCGGAATTTAGACAGC
GAGAGGACTTCAAAAAATCAGGTCCACCCAAGAAAAAACGCAAGGTGGAA
GATCCGAAGAAAAAGCGAAAAGTGGATGTGtaaCGTTTTCCGGGACGCCG
GCTGGATGATCCTCCAGCGCGGGGATCTCATGCTGGAGTTCTTCGCCCAC
CCCAACTTGTTTATTGCAGCTTATAATGGTTACAAATAAAGCAATAGCAT
CACAAATTTCACAAATAAAGCATTTTTTTCACTGCATTCTAGTTGTGGTT
TGTCCAAACTCATCAATGTATCTTATCATGTCTGTATACCG.

[0455] A E67-CjeCas9 and sgRNA plasmid may comprise or consist of the sequence (U6: N's=sgRNA spacer, E67, CjeCas9):

(SEQ ID NO: 203)
gtttattacagggacagcagagatccagtttggttaattaaggtaccgag
ggcctatttcccatgattccttcatatttgcatatacgatacaaggctgt
tagagagataattagaattaatttgactgtaaacacaaagatattagtac
aaaatacgtgacgtagaaagtaataatttcttgggtagtttgcagtttta
aaattatgttttaaaatggactatcatatgcttaccgtaacttgaaagta
tttcgatttcttggctttatatatcttGTGGAAAGGACGAAACACCNNNN
NNNNNNNNNNNNNNNGTTTTAGTCCCTGAAGGGACTAAAATAAAGAGTTT
GCGGGACTCTGCGGGGTTACAATCCCCTAAAACCGCTTTTTTTCCTGCAG
CCCGGGGGATCCACTAGTTCTAGAGCGGCCGCCACCGCGGTGGAGCTCCA
GCTTTTGTTCCCTTTAGTGAGGGTTAATTGCGCGAATTCGCTAGCTAGGT
CTTGAAAGGAGTGGGAATTGGCTCCGGTGCCCGTCAGTGGGCAGAGCGCA
CATCGCCCACAGTCCCCGAGAAGTTGGGGGGAGGGGTCGGCAATTGATCC
GGTGCCTAGAGAAGGTGGCGCGGGGTAAACTGGGAAAGTGATGTCGTGTA
CTGGCTCCGCCTTTTTCCCGAGGGTGGGGGAGAACCGTATATAAGTGCAG
TAGTCGCCGTGAACGTTCTTTTTCGCAACGGGTTTGCCGCCAGAACACAG
GACCGGTTCTAGAGCGCTATTTAGAACCatgCAGGAGGTAATAGCGGGGC
TTGAGCGATTTACCTTTGCCTTCGAAAAAGACGTAGAGATGCAGAAGGGA
ACCGGCCTGCTCCCATTTCAAGGTATGGACAAATCAGCATCTGCCGTGTG
CAATTTTTTCACCAAGGGTCTGTGTGAAAAGGGGAAGCTCTGTCCATTTC
GCCATGATCGCGGAGAGAAGATGGTGGTGTGTAAGCACTGGCTGAGAGGG
CTTTGCAAAAAAGGCGACCACTGCAAATTTCTTCACCAATATGACCTGAC
TCGAATGCCTGAGTGTTATTTTTACAGTAAGTTCGGTGACTGTAGCAACA
AAGAATGCAGCTTCTTGCATGTCAAACCAGCATTCAAGTCACAGGATTGC
CCGTGGTACGATCAGGGTTTTTGCAAGGACGGTCCCCTCTGCAAATATCG
ACACGTACCCAGAATTATGTGCCTTAATTACCTGGTCGGCTTCTGTCCTG
AAGGGCCAAAATGTCAGTTTGCTCAAAAAATTCGCGAGTTCAAATTGCTC
CCTGGGTCTAAAATTTGGGAACCCCAGGATTGGCAGCAGCAGCTTGTAAA
CATCCGAGCAATGAGGAACAAAAAAGATGCACCTGTTGATCACCTCGGAA
CCGAACATTGTTATGATTCTAGTGCGCCGCCAAAAGTCCGCCGGTATCAG
GTTCTGTTGAGTTTGATGCTGAGTAGTCAGACTAAGGACCAGGTTACGGC
CGGAGCAATGCAACGGCTTCGGGCACGGGGACTCACGGTCGATAGCATTT
TGCAGACCGATGACGCAACATTGGGTAAACTCATATATCCAGTTGGCTTC
TGGCGGAGCAAAGTGAAGTACATCAAGCAGACCTCAGCCATTCTCCAACA
ACATTACGGAGGTGATATACCCGCAAGCGTAGCTGAACTGGTAGCACTGC
CGGGCGTCGGTCCCAAAATGGCACATCTGGCTATGGCGGTTGCTTGGGGA
ACGGTGTCTGGTATCGCAGTTGATACGCATGTCCACCGCATCGCCAATCG
GCTGAGGTGGACTAAAAAAGCCACTAAGTCTCCTGAAGAAACACGGGCTG
CTCTGGAAGAGTGGCTTCCACGAGAGCTGTGGCATGAAATCAATGGATTG
CTGGTTGGTTTCGGGCAGCAGACATGCTTGCCCGTGCACCCCCGGTGTCA
TGCTTGCTTGAACCAGGCTTTGTGCCCAGCTGCCCAGGGCCTGAGTGGAA
GTGAGACACCGGGAACATCTGAGTCTGCGACCCCGGAGAGCacaaacGCG
CGAATCCTGGCCTTCGcgATTGGCATTAGCAGCATCGGCTGGGCATTCTC
TGAAAACGACGAACTGAAGGATTGCGGCGTGCGAATTTTCACTAAGGTCG
AAAATCCCAAAACTGGTGAATCACTCGCTCTCCCTAGACGACTGGCACGC
TCCGCACGAAAGAGGCTTGCCCGCCGCAAGGCACGCTTGAACCATCTTAA
ACACCTTATTGCAAATGAGTTTAAACTGAATTATGAGGACTACCAATCCT
TTGACGAGTCTCTTGCTAAAGCCTACAAAGGGAGCCTTATATCCCCGTAT
GAGCTCCGGTTCAGAGCACTCAACGAACTGCTGTCCAAACAGGATTTTGC
TCGCGTGATTCTCCACATAGCGAAGAGGCGAGGATACGATGACATTAAAA
ACAGTGATGATAAGGAAAAAGGGGCCATACTCAAAGCGATTAAGCAAAAT
GAAGAGAAGCTCGCTAACTATCAATCAGTAGGGGAGTATCTCTATAAAGA
GTACTTCCAGAAGTTCAAAGAAAATAGCAAGGAATTTACTAATGTCCGGA
ATAAAAAGGAGTCTTACGAAAGATGTATTGCGCAATCTTTCCTCAAGGAC
GAGCTCAAATTGATTTTCAAGAAACAAAGGGAATTTGGGTTCAGCTTCTC
AAAAAAATTTGAGGAAGAGGTTCTGAGCGTTGCCTTTTACAAACGCGCCC
TTAAGGACTTCTCACATCTCGTAGGGAATTGTAGTTTCTTCACCGATGAA
AAACGGGCGCCAAAAAATAGCCCTTTGGCTTTTATGTTTGTCGCTCTGAC
TCGCATCATTAATCTGCTCAACAACCTTAAAAACACGGAAGGGATTCTGT
ACACAAAGGATGATCTGAACGCTCTGCTTAACGAAGTTTTGAAGAACGGG
ACTTTGACCTACAAACAAACCAAAAAGCTTCTTGGTCTCAGTGATGACTA
CGAATTCAAGGGAGAAAAAGGGACATATTTCATCGAATTCAAGAAGTATA
AGGAGTTCATCAAAGCCTTGGGCGAGCACAACTTGTCTCAAGATGATCTC
AACGAAATTGCTAAGGATATCACTCTGATTAAAGACGAGATCAAGCTCAA
AAAGGCGTTGGCGAAGTATGACCTTAACCAAAACCAAATAGATAGCCTCA
GCAAGTTGGAATTTAAAGATCACTTGAATATAAGTTTCAAGGCCCTTAAG
TTGGTCACCCCCTTGATGCTTGAAGGAAAGAAATATGATGAGGCATGTAA
TGAGCTGAATCTCAAGGTTGCTATTAACGAAGACAAAAAAGATTTCCTCC
CAGCTTTCAATGAGACTTACTATAAGGACGAGGTTACCAATCCTGTGGTG
CTCCGAGCCATCAAAGAGTATCGAAAGGTCCTGAATGCTTTGCTCAAAAA
ATACGGTAAGGTACACAAAATAAATATTGAGCTCGCAAGGGAGGTCGGTA
AGAACCACTCCCAGCGCGCCAAAATAGAAAAGGAACAGAATGAAAATTAC
AAAGCGAAAAAGGACGCCGAGCTCGAGTGCGAAAAGCTGGGCCTGAAAAT
AAACAGCAAGAACATTCTCAAACTCCGCCTCTTCAAAGAACAAAAAGAAT
TTTGTGCTTATAGTGGTGAGAAAATAAAAATCTCCGATCTTCAAGACGAG
AAGATGCTCGAAATAGACgcgATATATCCATATAGCAGGTCTTTTGACGA
TTCTTACATGAATAAAGTGCTTGTTTTCACTAAGCAGAATCAGGAAAAGT
TGAATCAGACCCCCTTTGAGGCCTTTGGCAACGACTCAGCAAAGTGGCAG
AAGATCGAGGTCTTGGCTAAGAATCTTCCTACTAAGAAACAGAAAAGGAT
ATTGGATAAGAACTATAAAGACAAAGAACAAAAGAACTTTAAAGACCGCA
ACCTCAATGACACCAGATACATAGCAAGATTGGTTCTGAACTACACAAAA
GATTATTTGGACTTCTTGCCGCTGTCTGATGATGAGAACACGAAACTCAA
CGACACGCAAAAGGGGTCTAAAGTCCACGTCGAAGCTAAATCTGGGATGC
TCACCTCAGCATTGAGGCATACGTGGGGATTCTCAGCAAAGGACCGAAAC
AATCACCTGCACCATGCCATTGACGCAGTTATCATAGCGTATGCCAATAA
TTCAATAGTAAAAGCGTTTAGCGACTTCAAGAAGGAACAAGAGTCCAACA
GCGCCGAGCTCTACGCAAAAAAGATTAGTGAACTCGACTACAAAAACAAA
AGAAAATTCTTTGAGCCGTTCAGCGGATTTCGACAGAAGGTATTGGATAA
AATAGATGAAATTTTCGTGAGCAAACCCGAAAGGAAAAAGCCCTCAGGCG
CCTTGCACGAAGAGACTTTCAGGAAGGAAGAGGAATTCTACCAAAGCTAC
GGCGGAAAAGAGGGAGTTTTGAAGGCTCTCGAACTTGGAAAGATTAGGAA
GGTGAACGGCAAGATAGTGAAAAACGGCGATATGTTCCGGGTTGATATCT
TCAAACATAAAAAAACGAATAAATTTTATGCTGTGCCTATATACACTATG
GACTTCGCACTTAAGGTCCTGCCGAATAAGGCGGTAGCCCGATCTAAAAA
AGGCGAAATTAAGGACTGGATTTTGATGGATGAAAATTACGAGTTCTGCT
TTTCTCTCTACAAGGATTCCCTTATATTGATACAGACGAAAGATATGCAG
GAACCGGAATTCGTGTATTACAACGCTTTTACTTCCTCTACGGTATCTTT
GATTGTCTCCAAACATGACAACAAATTCGAAACACTCAGTAAAAACCAAA
AGATTCTCTTTAAAAATGCGAACGAGAAAGAAGTAATTGCAAAATCAATT
GGCATCCAAAATTTGAAAGTTTTTGAAAAATATATAGTATCTGCCCTCGG
AGAGGTTACTAAAGCGGAATTTAGACAGCGAGAGGACTTCAAAAAATCAG
GTCCACCCAAGAAAAAACGCAAGGTGGAAGATCCGAAGAAAAAGCGAAAA
GTGGATGTGtaaCGTTTTCCGGGACGCCGGCTGGATGATCCTCCAGCGCG
GGGATCTCATGCTGGAGTTCTTCGCCCACCCCAACTTGTTTATTGCAGCT
TATAATGGTTACAAATAAAGCAATAGCATCACAAATTTCACAAATAAAGC
ATTTTTTTCACTGCATTCTAGTTGTGGTTTGTCCAAACTCATCAATGTAT
CTTATCATGTCTGTATACCG.

### EXAMPLE EMBODIMENTS

[0456] Embodiment 1. A composition comprising:
   [0457] (a) a first sequence comprising a first guide RNA (gRNA) that specifically binds a target sequence within an RNA molecule, wherein the target sequence comprises a sequence encoding a component of an adaptive immune response and
   [0458] (b) a sequence encoding a fusion protein, the sequence comprising a sequence encoding a first RNA-binding polypeptide and a sequence encoding a second RNA-binding polypeptide,
   [0459] wherein neither the first RNA-binding polypeptide nor the second RNA-binding polypeptide comprises a significant DNA-nuclease activity,
   [0460] wherein the first RNA-binding polypeptide and the second RNA-binding polypeptide are not identical, and
   [0461] wherein the second RNA-binding polypeptide comprises an RNA-nuclease activity.
[0462] Embodiment 2. A composition comprising: (a) a first sequence comprising a first guide RNA (gRNA) that specifically binds a first target sequence within a first RNA molecule, wherein the first target sequence comprises a sequence encoding a component of an adaptive immune response and
   [0463] (b) a second sequence comprising a second guide RNA (gRNA) that specifically binds a second target sequence within a second RNA molecule and
   [0464] (c) a sequence encoding a fusion protein, the sequence comprising a sequence encoding a first RNA-binding polypeptide and a sequence encoding a second RNA-binding polypeptide,
   [0465] wherein neither the first RNA-binding polypeptide nor the second RNA-binding polypeptide comprises a significant DNA-nuclease activity,
   [0466] wherein the first RNA-binding polypeptide and the second RNA-binding polypeptide are not identical, and
   [0467] wherein the second RNA-binding polypeptide comprises an RNA-nuclease activity.
[0468] Embodiment 3. The composition of embodiment 2, wherein the first target sequence or the second target sequence comprises at least one repeated sequence.
[0469] Embodiment 4. The composition of embodiment 2, wherein the first sequence comprising the first gRNA further comprises a first promoter capable of expressing the gRNA in a eukaryotic cell and/or the second sequence comprising the second gRNA further comprises a second promoter capable of expressing the gRNA in a eukaryotic cell.
[0470] Embodiment 5. The composition of embodiment 2, wherein a sequence comprising the first sequence comprising the first gRNA and the second sequence comprising the second gRNA comprises a promoter capable of expressing the first gRNA and the second gRNA in a eukaryotic cell.
[0471] Embodiment 6. The composition of embodiment 4, wherein the first promoter and the second promoter are identical.
[0472] Embodiment 7. The composition of embodiment 4, wherein the first promoter and the second promoter are not identical.
[0473] Embodiment 8. The composition of any one of embodiments 4-7, wherein the eukaryotic cell is an animal cell.
[0474] Embodiment 9. The composition of embodiment 8, wherein the animal cell is a mammalian cell.
[0475] Embodiment 10. The composition of embodiment 9, wherein the animal cell is a human cell.
[0476] Embodiment 11. The composition of any one of embodiments 5-10, wherein the promoter is a constitutively active promoter.
[0477] Embodiment 12. The composition of any one of embodiments 5-11, wherein the promoter comprises a sequence isolated or derived from a promoter capable of driving expression of an RNA polymerase.
[0478] Embodiment 13. The composition of embodiment 12, wherein the promoter comprises a sequence isolated or derived from a U6 promoter.
[0479] Embodiment 14. The composition of any one of embodiments 5-12, wherein the promoter comprises a sequence isolated or derived from a promoter capable of driving expression of a transfer RNA (tRNA).
[0480] Embodiment 15. The composition of embodiment 14, wherein the promoter comprises a sequence isolated or derived from an alanine tRNA promoter, an arginine tRNA promoter, an asparagine tRNA promoter, an aspartic acid tRNA promoter, a cysteine tRNA promoter, a glutamine tRNA promoter, a glutamic acid tRNA promoter, a glycine tRNA promoter, a histidine tRNA promoter, an isoleucine tRNA promoter, a leucine tRNA promoter, a lysine tRNA promoter, a methionine tRNA promoter, a phenylalanine tRNA promoter, a proline tRNA promoter, a serine tRNA promoter, a threonine tRNA promoter, a tryptophan tRNA promoter, a tyrosine tRNA promoter, or a valine tRNA promoter.
[0481] Embodiment 16. The composition of embodiment 14, wherein the promoter comprises a sequence isolated or derived from a valine tRNA promoter.
[0482] Embodiment 17. The composition of any one of embodiments 2-16, wherein the sequence comprising the first gRNA further comprises a first spacer sequence that specifically binds to the first target RNA sequence.
[0483] Embodiment 18. The composition of embodiment 17, wherein the first spacer sequence has at least 50%, 55%, 60%, 65%, 70%, 75%, 80%, 87%, 90%, 95%, 97%, 99% or any percentage in between of complementarity to the first target RNA sequence.
[0484] Embodiment 19. The composition of embodiment 17, wherein the first spacer sequence has 100% complementarity to the target RNA sequence.
[0485] Embodiment 20. The composition of any one of embodiments 17-19, wherein the first spacer sequence comprises or consists of 20 nucleotides.
[0486] Embodiment 21. The composition of any one of embodiments 17-19, wherein the first spacer sequence comprises or consists of 21 nucleotides.
[0487] Embodiment 22. The composition of embodiment 21, wherein the first spacer sequence comprises or consists of 20 nucleotides of an amino acid sequence encoding a Beta-2-microglobulin (β2M) protein.
[0488] Embodiment 23. The composition of embodiment 22, wherein the first spacer sequence comprises or consists of 20 nucleotides of an amino acid sequence of

(SEQ ID NO: 88)
MSRSVALAVL ALLSLSGLEA IQRTPKIQVY SRHPADIEVD
LLKNGERIEK VEHSDLSFSK DWSFYLLYYT EFTPTEKDEY
ACRVNHVTLS QPKIVKWDRD M.

[0489] Embodiment 24. The composition of any one of embodiments 2-23, wherein the sequence comprising the first gRNA further comprises a first scaffold sequence that specifically binds to the first RNA binding protein.
[0490] Embodiment 25. The composition of embodiment 24, wherein the first scaffold sequence comprises a stem-loop structure.
[0491] Embodiment 26. The composition of embodiment 24 or 25, wherein the scaffold sequence comprises or consists of 90 nucleotides.
[0492] Embodiment 27. The composition of embodiment 24 or 25, wherein the scaffold sequence comprises or consists of 93 nucleotides.
[0493] Embodiment 28. The composition of embodiment 27, wherein the scaffold sequence comprises the sequence

(SEQ ID NO: 12)
GUUUAAGAGCUAUGCUGGAAACAGCAUAGCAAGUUUAAAUAAGGCUAGU
CCGUUAUCAACUUGAAAAAGUGGCACCGAGUCGGUGCUUUUUUU
or
(SEQ ID NO: 13)
GUUUUAGAGCUAGAAAUAGCAAGUUAAAAUAAGGCUAGUCCGUUAUCAA
CUUGAAAAAGUGGCACCGAGUCGGUGCUUUUUUU.

[0494] Embodiment 29. The composition of any one of embodiments 1-28, wherein the sequence comprising the second gRNA further comprises a second spacer sequence that specifically binds to the second target RNA sequence.
[0495] Embodiment 30. The composition of embodiment 29, wherein the second spacer sequence has at least 50%, 55%, 60%, 65%, 70%, 75%, 80%, 87%, 90%, 95%, 97%, 99% or any percentage in between of complementarity to the first target RNA sequence.
[0496] Embodiment 31. The composition of embodiment 29, wherein the second spacer sequence has 100% complementarity to the target RNA sequence.
[0497] Embodiment 32. The composition of any one of embodiments 29-31, wherein the second spacer sequence comprises or consists of 20 nucleotides.
[0498] Embodiment 33. The composition of any one of embodiments 29-31, wherein the second spacer sequence comprises or consists of 21 nucleotides.
[0499] Embodiment 34. The composition of any one of embodiments 2-34, wherein the second spacer sequence comprises or further comprises a sequence comprising at least 1, 2, 3, 4, 5, 6, or 7 repeats of the sequence CUG (SEQ ID NO: 18), CCUG (SEQ ID NO: 19), CAG (SEQ ID NO: 80), GGGGCC (SEQ ID NO: 81) or any combination thereof.
[0500] Embodiment 35. The composition of any one of embodiments 2-34, wherein the sequence comprising the second gRNA further comprises a second scaffold sequence that specifically binds to the first RNA binding protein.
[0501] Embodiment 36. The composition of embodiment 35, wherein the second scaffold sequence comprises a stem-loop structure.
[0502] Embodiment 37. The composition of embodiment 35 or 36, wherein the second scaffold sequence comprises or consists of 85 nucleotides.
[0503] Embodiment 38. The composition of embodiment 37, wherein the second scaffold sequence comprises the sequence

(SEQ ID NO: 12)
GUUUAAGAGCUAUGCUGGAAACAGCAUAGCAAGUUUAAAUAAGGCUAGU
CCGUUAUCAACUUGAAAAAGUGGCACCGAGUCGGUGCUUUUUUU
or
(SEQ ID NO: 13)
GUUUUAGAGCUAGAAAUAGCAAGUUAAAAUAAGGCUAGUCCGUUAUCAA
CUUGAAAAAGUGGCACCGAGUCGGUGCUUUUUUU.

[0504] Embodiment 39. The composition of embodiment 1, wherein the gRNA does not bind or does not selectively bind to a second sequence within the RNA molecule.
[0505] Embodiment 40. The composition of any one of embodiments 2-38, wherein the first gRNA does not bind or does not selectively bind to a second sequence within the first RNA molecule.
[0506] Embodiment 41. The composition of any one of embodiments 2-38, wherein the second gRNA does not bind or does not selectively bind to a second sequence within the second RNA molecule.
[0507] Embodiment 42. The composition of embodiment 39, wherein an RNA genome or an RNA transcriptome comprises the RNA molecule.
[0508] Embodiment 43. The composition of embodiment 40 or 41, wherein an RNA genome or an RNA transcriptome comprises the first RNA molecule or the second RNA molecule.
[0509] Embodiment 44. The composition of any one of embodiments 1-43, wherein the first RNA binding protein comprises a CRISPR-Cas protein.
[0510] Embodiment 45. The composition of embodiment 44, wherein the CRISPR-Cas protein is a Type II CRISPR-Cas protein.
[0511] Embodiment 46. The composition of embodiment 45, wherein the first RNA binding protein comprises a Cas9 polypeptide or an RNA-binding portion thereof.
[0512] Embodiment 47. The composition of embodiment 44, wherein the CRISPR-Cas protein is a Type V CRISPR-Cas protein.
[0513] Embodiment 48. The composition of embodiment 47, wherein the first RNA binding protein comprises a Cpf1 polypeptide or an RNA-binding portion thereof.
[0514] Embodiment 49. The composition of embodiment 44, wherein the CRISPR-Cas protein is a Type VI CRISPR-Cas protein.
[0515] Embodiment 50. The composition of embodiment 49, wherein the first RNA binding protein comprises a Cas13 polypeptide or an RNA-binding portion thereof.
[0516] Embodiment 51. The composition of any one of embodiments 44-50, wherein the CRISPR-Cas protein comprises a native RNA nuclease activity.
[0517] Embodiment 52. The composition of embodiment 51, wherein the native RNA nuclease activity is reduced or inhibited.
[0518] Embodiment 53. The composition of embodiment 52, wherein the native RNA nuclease activity is increased or induced.
[0519] Embodiment 54. The composition of any one of embodiments 44-53, wherein the CRISPR-Cas protein comprises a native DNA nuclease activity and wherein the native DNA nuclease activity is inhibited.
[0520] Embodiment 55. The composition of embodiment 54, wherein the CRISPR-Cas protein comprises a mutation.
[0521] Embodiment 56. The composition of embodiment 54 or 55, wherein a nuclease domain of the CRISPR-Cas protein comprises the mutation.
[0522] Embodiment 57. The composition of any one of embodiments 54-56, wherein the mutation occurs in a nucleic acid encoding the CRISPR-Cas protein.
[0523] Embodiment 58. The composition of any one of embodiments 54-56, wherein the mutation occurs in an amino acid encoding the CRISPR-Cas protein.
[0524] Embodiment 59. The composition of any one of embodiments 54-58, wherein the mutation comprises a substitution, an insertion, a deletion, a frameshift, an inversion, or a transposition.
[0525] Embodiment 60. The composition of embodiment 59, wherein the mutation comprises a deletion of a nuclease domain, a binding site within the nuclease domain, an active site within the nuclease domain, or at least one essential amino acid residue within the nuclease domain.
[0526] Embodiment 61. The composition of any one of embodiments 1-43, wherein the first RNA binding protein comprises a Pumilio and FBF (PUF) protein.
[0527] Embodiment 62. The composition of embodiment 61, wherein the first RNA binding protein comprises a Pumilio-based assembly (PUMBY) protein.
[0528] Embodiment 63. The composition of any one of embodiments 1-56, wherein the first RNA binding protein does not require multimerization for RNA-binding activity.
[0529] Embodiment 64. The composition of embodiment 63, wherein the first RNA binding protein is not a monomer of a multimer complex
[0530] Embodiment 65. The composition of embodiment 63, wherein a multimer protein complex does not comprise the first RNA binding protein.
[0531] Embodiment 66. The composition of any one of embodiments 1-65, wherein the first RNA binding protein selectively binds to a target sequence within the RNA molecule.
[0532] Embodiment 67. The composition of embodiment 66, wherein the first RNA binding protein does not comprise an affinity for a second sequence within the RNA molecule.
[0533] Embodiment 68. The composition of embodiment 66 or 67, wherein the first RNA binding protein does not comprise a high affinity for or selectively bind a second sequence within the RNA molecule.
[0534] Embodiment 69. The composition of embodiment 68, wherein an RNA genome or an RNA transcriptome comprises the RNA molecule.
[0535] Embodiment 70. The composition of any one of embodiments 1-69, wherein the first RNA binding protein comprises between 2 and 1300 amino acids, inclusive of the endpoints.
[0536] Embodiment 71. The composition of any one of embodiments 1-70, wherein the sequence encoding the first RNA binding protein further comprises a nuclear localization signal (NLS).
[0537] Embodiment 72. The composition of embodiment 71, wherein the sequence encoding a nuclear localization signal (NLS) is positioned 3′ to the sequence encoding the first RNA binding protein.
[0538] Embodiment 73. The composition of embodiment 72, wherein the first RNA binding protein comprises an NLS at a C-terminus of the protein.
[0539] Embodiment 74. The composition of any one of embodiments 1-70, wherein the sequence encoding the first RNA binding protein further comprises a first sequence encoding a first NLS and a second sequence encoding a second NLS.
[0540] Embodiment 75. The composition of embodiment 74, wherein the sequence encoding the first NLS or the second NLS is positioned 3′ to the sequence encoding the first RNA binding protein.
[0541] Embodiment 76. The composition of embodiment 75, wherein the first RNA binding protein comprises the first NLS or the second NLS at a C-terminus of the protein.
[0542] Embodiment 77. The composition of any one of embodiments 1-76, wherein the second RNA binding protein comprises or consists of a nuclease domain.
[0543] Embodiment 78. The composition of embodiment 77, wherein the second RNA binding protein comprises or consists of an RNAse.
[0544] Embodiment 79. The composition of embodiment 78, wherein the second RNA binding protein comprises or consists of an RNAse1.
[0545] Embodiment 80. The composition of embodiment 79, wherein the RNAse1 protein comprises or consists of SEQ ID NO: 20.
[0546] Embodiment 81. The composition of embodiment 78, wherein the second RNA binding protein comprises or consists of an RNAse4.
[0547] Embodiment 82. The composition of embodiment 81, wherein the RNAse4 protein comprises or consists of SEQ ID NO: 21.
[0548] Embodiment 83. The composition of embodiment 78, wherein the second RNA binding protein comprises or consists of an RNAse6.
[0549] Embodiment 84. The composition of embodiment 83, wherein the RNAse6 protein comprises or consists of SEQ ID NO: 22.
[0550] Embodiment 85. The composition of embodiment 78, wherein the second RNA binding protein comprises or consists of an RNAse7.
[0551] Embodiment 86. The composition of embodiment 85, wherein the RNAse7 protein comprises or consists of SEQ ID NO: 23.
[0552] Embodiment 87. The composition of embodiment 78, wherein the second RNA binding protein comprises or consists of an RNAse8.
[0553] Embodiment 88. The composition of embodiment 87, wherein the RNAse8 protein comprises or consists of SEQ ID NO: 24.
[0554] Embodiment 89. The composition of embodiment 88, wherein the second RNA binding protein comprises or consists of an RNAse2.
[0555] Embodiment 90. The composition of embodiment 89, wherein the RNAse2 protein comprises or consists of SEQ ID NO: 25.
[0556] Embodiment 91. The composition of embodiment 78, wherein the second RNA binding protein comprises or consists of an RNAse6PL.
[0557] Embodiment 92. The composition of embodiment 91, wherein the RNAse6PL protein comprises or consists of SEQ ID NO: 26.
[0558] Embodiment 93. The composition of embodiment 78, wherein the second RNA binding protein comprises or consists of an RNAseL.
[0559] Embodiment 94. The composition of embodiment 93, wherein the RNAseL protein comprises or consists of SEQ ID NO: 27.
[0560] Embodiment 95. The composition of embodiment 78, wherein the second RNA binding protein comprises or consists of an RNAseT2.
[0561] Embodiment 96. The composition of embodiment 95, wherein the RNAseT2 protein comprises or consists of SEQ ID NO: 28.
[0562] Embodiment 97. The composition of embodiment 78, wherein the second RNA binding protein comprises or consists of an RNAse11.
[0563] Embodiment 98. The composition of embodiment 97, wherein the RNAse11 protein comprises or consists of SEQ ID NO: 29.
[0564] Embodiment 99. The composition of embodiment 78, wherein the second RNA binding protein comprises or consists of an RNAseT2-like.
[0565] Embodiment 100. The composition of embodiment 99, wherein the RNAseT2-like protein comprises or consists of SEQ ID NO: 30.
[0566] Embodiment 101. The composition of embodiment 77, wherein the second RNA binding protein comprises or consists of a NOB1 polypeptide.
[0567] Embodiment 102. The composition of embodiment 101, wherein the NOB1 polypeptide comprises or consists of SEQ ID NO: 31.
[0568] Embodiment 103. The composition of embodiment 77, wherein the second RNA binding protein comprises or consists of an endonuclease.
[0569] Embodiment 104. The composition of embodiment 103, wherein the second RNA binding protein comprises or consists of an endonuclease V (ENDOV) polypeptide.
[0570] Embodiment 105. The composition of embodiment 104, wherein the ENDOV protein comprises or consists of SEQ ID NO: 32.
[0571] Embodiment 106. The composition of embodiment 103, wherein the second RNA binding protein comprises or consists of an endonuclease G (ENDOG).
[0572] Embodiment 107. The composition of embodiment 106, wherein the ENDOG protein comprises or consists of SEQ ID NO: 33.
[0573] Embodiment 108. The composition of embodiment 103, wherein the second RNA binding protein comprises or consists of an endonuclease D1 (ENDOD1) polypeptide.
[0574] Embodiment 109. The composition of embodiment 108, wherein the ENDOD1 comprises or consists of SEQ ID NO: 34.
[0575] Embodiment 110. The composition of embodiment 77, wherein the second RNA binding protein comprises or consists of a Human flap endonuclease-1 (hFEN1) polypeptide.
[0576] Embodiment 111. The composition of embodiment 110, wherein the hFEN1 protein comprises or consists of SEQ ID NO: 35.
[0577] Embodiment 112. The composition of embodiment 77, wherein the second RNA binding protein comprises or consists of a human Schlafen 14 (hSLFN14) polypeptide.
[0578] Embodiment 113. The composition of embodiment 112, wherein the hSLFN14 polypeptide comprises or consists of SEQ ID NO: 36.
[0579] Embodiment 114. The composition of embodiment 77, wherein the second RNA binding protein comprises or consists of a human beta-lactamase-like protein 2 (hLACTB2) polypeptide.
[0580] Embodiment 115. The composition of embodiment 114, wherein the hLACTB2 polypeptide comprises or consists of SEQ ID NO: 37.
[0581] Embodiment 116. The composition of embodiment 77, wherein the second RNA binding protein comprises or consists of an apurinic/apyrimidinic (AP) endodeoxyribonuclease (APEX2) polypeptide.
[0582] Embodiment 117. The composition of embodiment 116, wherein the APEX2 polypeptide comprises or consists of SEQ ID NO: 38.
[0583] Embodiment 118. The composition of embodiment 116, wherein the APEX2 polypeptide comprises or consists of SEQ ID NO: 39.
[0584] Embodiment 119. The composition of embodiment 77, wherein the second RNA binding protein comprises or consists of an angiogenin (ANG) polypeptide.
[0585] Embodiment 120. The composition of embodiment 119, wherein the ANG polypeptide comprises or consists of SEQ ID NO: 40.
[0586] Embodiment 121. The composition of embodiment 77, wherein the second RNA binding protein comprises or consists of a heat responsive protein 12 (HRSP12) polypeptide.
[0587] Embodiment 122. The composition of embodiment 121, wherein the HRSP12 polypeptide comprises or consists of SEQ ID NO: 41.
[0588] Embodiment 123. The composition of embodiment 77, wherein the second RNA binding protein comprises or consists of a Zinc Finger CCCH-Type Containing 12A (ZC3H12A) polypeptide.
[0589] Embodiment 124. The composition of embodiment 123, wherein the ZC3H12A polypeptide comprises or consists of SEQ ID NO: 42.
[0590] Embodiment 125. The composition of embodiment 124, wherein the ZC3H12A polypeptide comprises or consists of SEQ ID NO: 43.
[0591] Embodiment 126. The composition of embodiment 77, wherein the second RNA binding protein comprises or consists of a Reactive Intermediate Imine Deaminase A (RIDA) polypeptide.
[0592] Embodiment 127. The composition of embodiment 126, wherein the RIDA polypeptide comprises or consists of SEQ ID NO: 44.
[0593] Embodiment 128. The composition of embodiment 77, wherein the second RNA binding protein comprises or consists of a Phospholipase D Family Member 6 (PDL6) polypeptide.
[0594] Embodiment 129. The composition of embodiment 128, wherein the PDL6 polypeptide comprises or consists of SEQ ID NO: 126.
[0595] Embodiment 130. The composition of embodiment 77, wherein the second RNA binding protein comprises or consists of a Endonuclease III-like protein 1 (NTHL) polypeptide.
[0596] Embodiment 131. The composition of embodiment 130, wherein the NTHL polypeptide comprises or consists of SEQ ID NO: 123.
[0597] Embodiment 132. The composition of embodiment 77, wherein the second RNA binding protein comprises or consists of a Mitochondrial ribonuclease P catalytic subunit (KIAA0391) polypeptide.
[0598] Embodiment 133. The composition of embodiment 132, wherein the KIAA0391 polypeptide comprises or consists of SEQ ID NO: 127.
[0599] Embodiment 134. The composition of embodiment 77, wherein the second RNA binding protein comprises or consists of an apurinic or apyrimidinic site lyase (APEX1) polypeptide.
[0600] Embodiment 135. The composition of embodiment 134, wherein the APEX1 polypeptide comprises or consists of SEQ ID NO: 125.
[0601] Embodiment 136. The composition of embodiment 77, wherein the second RNA binding protein comprises or consists of an argonaute 2 (AGO2) polypeptide.
[0602] Embodiment 137. The composition of embodiment 136, wherein the AGO2 polypeptide comprises or consists of SEQ ID NO: 128.
[0603] Embodiment 138. The composition of embodiment 67, wherein the second RNA binding protein comprises or consists of a mitochondrial nuclease EXOG (EXOG) polypeptide.
[0604] Embodiment 139. The composition of embodiment 138, wherein the EXOG polypeptide comprises or consists of SEQ ID NO: 129.
[0605] Embodiment 140. The composition of embodiment 77, wherein the second RNA binding protein comprises or consists of a Zinc Finger CCCH-Type Containing 12D (ZC3H12D) polypeptide.
[0606] Embodiment 141. The composition of embodiment 140, wherein the ZC3H12D polypeptide comprises or consists of SEQ ID NO: 130.
[0607] Embodiment 142. The composition of embodiment 77, wherein the second RNA binding protein comprises or consists of an endoplasmic reticulum to nucleus signaling 2 (ERN2) polypeptide.
[0608] Embodiment 143. The composition of embodiment 142, wherein the ERN2 polypeptide comprises or consists of SEQ ID NO: 131.
[0609] Embodiment 144. The composition of embodiment 77, wherein the second RNA binding protein comprises or consists of a pelota mRNA surveillance and ribosome rescue factor (PELO) polypeptide.
[0610] Embodiment 145. The composition of embodiment 144, wherein the PELO polypeptide comprises or consists of SEQ ID NO: 132.
[0611] Embodiment 146. The composition of embodiment 77, wherein the second RNA binding protein comprises or consists of a YBEY metallopeptidase (YBEY) polypeptide.
[0612] Embodiment 147. The composition of embodiment 146, wherein the YBEY polypeptide comprises or consists of SEQ ID NO: 133.
[0613] Embodiment 148. The composition of embodiment 77, wherein the second RNA binding protein comprises or consists of a cleavage and polyadenylation specific factor 4 like (CPSF4L) polypeptide.
[0614] Embodiment 149. The composition of embodiment 148, wherein the CPSF4L polypeptide comprises or consists of SEQ ID NO: 134.
[0615] Embodiment 150. The composition of embodiment 77, wherein the second RNA binding protein comprises or consists of an hCG_2002731 polypeptide.
[0616] Embodiment 151. The composition of embodiment 150, wherein the hCG_2002731 polypeptide comprises or consists of SEQ ID NO: 135.
[0617] Embodiment 152. The composition of embodiment 150, wherein the hCG_2002731 polypeptide comprises or consists of SEQ ID NO: 136.
[0618] Embodiment 153. The composition of embodiment 77, wherein the second RNA binding protein comprises or consists of an Excision Repair Cross-Complementation Group 1 (ERCC1) polypeptide.
[0619] Embodiment 154. The composition of embodiment 153, wherein the ERCC1 polypeptide comprises or consists of SEQ ID NO: 137.
[0620] Embodiment 155. The composition of embodiment 77, wherein the second RNA binding protein comprises or consists of a ras-related C3 botulinum toxin substrate 1 isoform (RAC1) polypeptide.
[0621] Embodiment 156. The composition of embodiment 155, wherein the RAC1 polypeptide comprises or consists of SEQ ID NO: 138.
[0622] Embodiment 157. The composition of embodiment 77, wherein the second RNA binding protein comprises or consists of a Ribonuclease A A1 (RAA1) polypeptide.
[0623] Embodiment 158. The composition of embodiment 157, wherein the RAA1 polypeptide comprises or consists of SEQ ID NO: 139.
[0624] Embodiment 159. The composition of embodiment 77, wherein the second RNA binding protein comprises or consists of a Ras Related Protein (RAB1) polypeptide.
[0625] Embodiment 160. The composition of embodiment 159, wherein the RAB1 polypeptide comprises or consists of SEQ ID NO: 140.
[0626] Embodiment 161. The composition of embodiment 77, wherein the second RNA binding protein comprises or consists of a DNA Replication Helicase/Nuclease 2 (DNA2) polypeptide.
[0627] Embodiment 162. The composition of embodiment 161, wherein the DNA2 polypeptide comprises or consists of SEQ ID NO: 141.
[0628] Embodiment 163. The composition of embodiment 77, wherein the second RNA binding protein comprises or consists of a FLJ35220 polypeptide.
[0629] Embodiment 164. The composition of embodiment 163, wherein the FLJ35220 polypeptide comprises or consists of SEQ ID NO: 142.
[0630] Embodiment 165. The composition of embodiment 77, wherein the second RNA binding protein comprises or consists of a FLJ13173 polypeptide.
[0631] Embodiment 166. The composition of embodiment 165, wherein the FLJ13173 polypeptide comprises or consists of SEQ ID NO: 143.
[0632] Embodiment 167. The composition of embodiment 77, wherein the second RNA binding protein comprises or consists of a DNA repair endonuclease XPF (ERCC4) polypeptide.
[0633] Embodiment 168. The composition of embodiment 167, wherein the ERCC4 polypeptide comprises or consists of SEQ ID NO: 124.
[0634] Embodiment 169. The composition of embodiment 77, wherein the second RNA binding protein comprises or consists of a mutated Rnase1 (Rnase1(K41R)) polypeptide.
[0635] Embodiment 170. The composition of embodiment 169, wherein the Rnase1(K41R) polypeptide comprises or consists of SEQ ID NO: 116.
[0636] Embodiment 171. The composition of embodiment 77, wherein the second RNA binding protein comprises or consists of a mutated Rnase1 (Rnase1(K41R, D121E)) polypeptide.
[0637] Embodiment 172. The composition of embodiment 171, wherein the Rnase1 (Rnase1(K41R, D121E)) polypeptide comprises or consists of SEQ ID NO: 117.
[0638] Embodiment 173. The composition of embodiment 77, wherein the second RNA binding protein comprises or consists of a mutated Rnase1 (Rnase1(K41R, D121E, H119N)) polypeptide.
[0639] Embodiment 174. The composition of embodiment 173, wherein the Rnase1 (Rnase1(K41R, D121E, Hi19N)) polypeptide comprises or consists of SEQ ID NO: 118.
[0640] Embodiment 175. The composition of embodiment 77, wherein the second RNA binding protein comprises or consists of a mutated Rnase1 (Rnase1(H119N)) polypeptide.
[0641] Embodiment 166. The composition of embodiment 175, wherein the Rnase1 (Rnase1(H119N)) polypeptide comprises or consists of SEQ ID NO: 119.
[0642] Embodiment 177. The composition of embodiment 77, wherein the second RNA binding protein comprises or consists of a mutated Rnase1 (Rnase1(R39D, N67D, N88A, G89D, R91D, Hi19N)) polypeptide.
[0643] Embodiment 178. The composition of embodiment 177, wherein the Rnase1 (Rnase1(R39D, N67D, N88A, G89D, R91D, Hi19N)) polypeptide comprises or consists of SEQ ID NO: 120.
[0644] Embodiment 179. The composition of embodiment 77, wherein the second RNA binding protein comprises or consists of a mutated Rnase1 (Rnase1(R39D, N67D, N88A, G89D, R91D, Hi19N)) polypeptide.
[0645] Embodiment 180. The composition of embodiment 179, wherein the Rnase1 (Rnase1(R39D, N67D, N88A, G89D, R91D, H119N, K41R, D121E)) polypeptide comprises or consists of SEQ ID NO: 121.
[0646] Embodiment 181. The composition of embodiment 77, wherein the second RNA binding protein comprises or consists of a mutated Rnase1 (Rnase1(R39D, N67D, N88A, G89D, R91D, H119N)) polypeptide.
[0647] Embodiment 182. The composition of embodiment 181, wherein the Rnase1 (Rnase1(R39D, N67D, N88A, G89D, R91D)) polypeptide comprises or consists of SEQ ID NO: 122.
[0648] Embodiment 183. The composition of embodiment 77, wherein the second RNA binding protein comprises or consists of Teneurin Transmembrane Protein 1 (TENM1) polypeptide.
[0649] Embodiment 184. The composition of embodiment 173, wherein the TENM1 polypeptide comprises or consists of SEQ ID NO: 144.
[0650] Embodiment 185. The composition of embodiment 77, wherein the second RNA binding protein comprises or consists of Teneurin Transmembrane Protein 2 (TENM2) polypeptide.
[0651] Embodiment 186. The composition of embodiment 185, wherein the TENM2 polypeptide comprises or consists of SEQ ID NO: 145.
[0652] Embodiment 187. The composition of any one of embodiments 1-77, wherein the second RNA binding protein comprises or consists of a transcription activator-like effector nuclease (TALEN) polypeptide or a nuclease domain thereof.
[0653] Embodiment 188. The composition of embodiment 187, wherein the TALEN polypeptide comprises or consists of:

| (SEQ ID NO: 205) | |
|---|---|
| 1 | MRIGKSSGWL NESVSLEYEH VSPPTRPRDT RRRPRAAGDG GLAHLHRRLA VGYAEDTPRT |
| 61 | EARSPAPRRP LPVAPASAPP APSLVPEPPM PVSLPAVSSP RFSAGSSAAI TDPFPSLPPT |
| 121 | PVLYAMAREL EALSDATWQP AVPLPAEPPT DARRGNTVFD EASASSPVIA SACPQAFASP |
| 181 | PRAPRSARAR RARTGGDAWP APTFLSRPSS SRIGRDVFGK LVALGYSREQ IRKLKQESLS |
| 241 | EIAKYHTTLT GQGFTHADIC RISRRRQSLR VVARNYPELA AALPELTRAH IVDIARQRSG |
| 301 | DLALQALLPV ATALTAAPLR LSASQIATVA QYGERPAIQA LYRLRRKLTR APLHLTPQQV |
| 361 | VAIASNTGGK RALEAVCVQL PVLRAAPYRL STEQVVAIAS NKGGKQALEA VKAHLLDLLG |
| 421 | APYVLDTEQV VAIASHNGGK QALEAVKADL LDLRGAPYAL STEQVVAIAS HNGGKQALEA |
| 481 | VKADLLELRG APYALSTEQV VAIASHNGGK QALEAVKAHL LDLRGVPYAL STEQVVAIAS |
| 541 | HNGGKQALEA VKAQLLDLRG APYALSTAQV VAIASNGGGK QALEGIGEQL LKLRTAPYGL |
| 601 | STEQVVAIAS HDGGKQALEA VGAQLVALRA APYALSTEQV VAIASNKGGK QALEAVKAQL |
| 661 | LELRGAPYAL STAQVVAIAS HDGGNQALEA VGTQLVALRA APYALSTEQV VAIASHDGGK |
| 721 | QALEAVGAQL VALRAAPYAL NTEQVVAIAS SHGGKQALEA VRALFPDLRA APYALSTAQL |
| 781 | VAIASNPGGK QALEAVRALF RELRAAPYAL STEQVVAIAS NHGGKQALEA VRALFRGLRA |
| 841 | APYGLSTAQV VAIASSNGGK QALEAVWALL PVLRATPYDL NTAQIVAIAS HDGGKPALEA |
| 901 | VWAKLPVLRG APYALSTAQV VAIACISGQQ ALEAIEAHMP TLRQASHSLS PERVAAIACI |
| 961 | GGRSAVEAVR QGLPVKAIRR IRREKAPVAG PPPASLGPTP QELVAVLHFF RAHQQPRQAF |
| 1021 | VDALAAFQAT RPALLRLLSS VGVTEIEALG GTIPDATERW QRLLGRLGFR PATGAAAPSP |
| 1081 | DSLQGFAQSL ERTLGSPGMA GQSACSPHRK RPAETAIAPR SIRRSPNNAG QPSEPWPDQL |
| 1141 | AWLQRRKRTA RSHIRADSAA SVPANLHLGT RAQFTPDRLR AEPGPIMQAH TSPASVSFGS |
| 1201 | HVAFEPGLPD PGTPTSADLA SFEAEPFGVG PLDFHLDWLL QILET. |

[0654] Embodiment 189. The composition of embodiment 187, wherein the TALEN polypeptide comprises or consists of:

| (SEQ ID NO: 206) | |
|---|---|
| 1 | mdpirsrtps parellpgpq pdrvqptadr ggappaggpl dglparrtms rtrlpsppap |
| 61 | spafsagsfs dllrqfdpsl ldtslldsmp avgtphtaaa paecdevqsg lraaddpppt |
| 121 | vrvavtaarp prakpaprrr aaqpsdaspa aqvdlrtlgy sqqqqekikp kvgstvaqhh |
| 181 | ealvghgfth ahivalsrhp aalgtvavky qdmiaalpea thedivgvgk qwsgaralea |
| 241 | lltvagelrg pplqldtgql vkiakrggvt aveavhasrn altgaplnlt paqvvaiasn |
| 301 | nggkqaletv qrllpvlcqa hgltpaqvva iashdggkqa letmqrllpv lcqahglppd |
| 361 | qvvaiasnig gkqaletvqr llpvlcqahg ltpdqvvaia shgggkqale tvqrllpvlc |
| 421 | qahgltpdqv vaiashdggk qaletvqrll pvlcqahglt pdqvvaiasn gggkqaletv |
| 481 | qrllpvlcqa hgltpdqvva iasnggkqal etvqrllpvl cqahgltpdq vvaiashdgg |
| 541 | kqaletvqrl lpvlcqthgl tpaqvvaias hdggkqalet vqqllpvlcq ahgltpdqvv |
| 601 | aiasniggkq alatvqrllp vlcqahgltp dqvvaiasng ggkqaletvq rllpvlcqah |
| 661 | gltpdqvvai asngggkqal etvqrllpvl cqahgltqvq vvaiasnigg kqaletvqrl |
| 721 | lpvlcqahgl tpaqvvaias hdggkqalet vqrllpvlcq ahgltpdqvv aiasngggkq |
| 781 | aletvqrllp vlcqahgltq eqvvaiasnn ggkqaletvq rllpvlcqah gltpdqvvai |
| 841 | asngggkqal etvqrllpvl cqahgltpaq vvaiasnigg kqaletvqrl lpvlcqdhgl |
| 901 | tlaqvvaias niggkqalet vqrllpvlcq ahgltqdqvv aiasniggkq aletvqrllp |
| 961 | vlcqdhgltp dqvvaiasni ggkqaletvq rllpvlcqdh gltldqvvai asnggkqale |
| 1021 | tvqrllpvlc qdhgltpdqv vaiasnsggk qaletvqrll pvlcqdhglt pnqvvaiasn |
| 1081 | ggkqalesiv aqlsrpdpal aaltndhlva laclggrpam davkkglpha pelirrvnrr |
| 1141 | igertshrva dyaqvvrvle ffqchshpay afdeamtqfg msrnglvqlf rrvgvtelea |
| 1201 | rggtlppasq rwdrilqasg mkrakpspts aqtpdqaslh afadslerdl dapspmhegd |
| 1261 | qtgassrkrs rsdravtgps aqhsfevrvp eqrdalhlpl swrvkrprtr iggglpdpgt |
| 1321 | piaadlaass tvmweqdaap fagaaddfpa fneeelawlm ellpqsgsvg gti. |

[0655] Embodiment 190. The composition of any one of embodiments 1-77, wherein the second RNA binding protein comprises or consists of a zinc finger nuclease polypeptide or a nuclease domain thereof.
[0656] Embodiment 191. The composition of embodiment 190, wherein the zinc finger nuclease polypeptide comprises or consists of:

| (SEQ ID NO: 207) | |
|---|---|
| 1 | MSRPRFNPRG DFPLQRPRAP NPSGMRPPGP FMRPGSMGLP RFYPAGRARG IPHRFAGHES |
| 61 | YQNMGPQRMN VQVTQHRTDP RLTKEKLDFH EAQQKKGKPH GSRWDDEPHI SASVAVKQSS |
| 121 | VTQVTEQSPK VQSRYTKESA SSILASFGLS NEDLEELSRY PDEQLTPENM PLILRDIRMR |
| 181 | KMGRRLPNLP SQSRNKETLG SEAVSSNVID YGHASKYGYT EDPLEVRIYD PEIPTDEVEN |
| 241 | EFQSQQNISA SVPNPNVICN SMFPVEDVFR QMDFPGESSN NRSFFSVESG TKMSGLHISG |
| 301 | GQSVLEPIKS VNQSINQTVS QTMSQSLIPP SMNQQPFSSE LISSVSQQER IPHEPVINSS |
| 361 | NVHVGSRGSK KNYQSQADIP IRSPFGIVKA SWLPKFSHAD AQKMKRLPTP SMMNDYYAAS |
| 421 | PRIFPHLCSL CNVECSHLKD WIQHQNTSTH IESCRQLRQQ YPDWNPEILP SRRNEGNRKE |
| 481 | NETPRRRSHS PSPRRSRRSS SSHRFRRSRS PMHYMYRPRS RSPRICHRFI SRYRSRSRSR |
| 541 | SPYRIRNPFR GSPKCFRSVS PERMSRRSVR SSDRKKALED VVQRSGHGTE FNKQKHLEAA |
| 601 | DKGHSPAQKP KTSSGTKPSV KPTSATKSDS NLGGHSIRCK SKNLEDDTLS ECKQVSDKAV |
| 661 | SLQRKLRKEQ SLHYGSVLLI TELPEDGCTE EDVRKLFQPF GKVNDVLIVP YRKEAYLEME |
| 721 | FKEAITAIMK YIETTPLTIK GKSVKICVPG KKKAQNKEVK KKTLESKKVS ASTLKRDADA |
| 781 | SKAVEIVTST SAAKTGQAKA SVAKVNKSTG KSASSVKSVV TVAVKGNKAS IKTAKSGGKK |
| 841 | SLEAKKTGNV KNKDSNKPVT IPENSEIKTS IEVKATENCA KEAISDAALE ATENEPLNKE |
| 901 | TEEMCVMLVS NLPNKGYSVE EVYDLAKPFG GLKDILILSS HKKAYIEINR KAAESMVKFY |
| 961 | TCFPVLMDGN QLSISMAPEN MNIKDEEAIF ITLVKENDPE ANIDTIYDRF VHLDNLPEDG |
| 1021 | LQCVLCVGLQ FGKVDHHVFI SNRNKAILQL DSPESAQSMY SFLKQNPQNI GDHMLTCSLS |
| 1081 | PKIDLPEVQI EHDPELEKES PGLKNSPIDE SEVQTATDSP SVKPNELEEE STPSIQTETL |
| 1141 | VQQEEPCEEE AEKATCDSDF AVETLELETQ GEEVKEEIPL VASASVSIEQ FTENAEECAL |
| 1201 | NQQMFNSDLE KKGAEIINPK TALLPSDSVF AEERNLKGIL EESPSEAEDF ISGITQTMVE |
| 1261 | AVAEVEKNET VSEILPSTCI VTLVPGIPTG DEKTVDKKNI SEKKGNMDEK EEKEFNTKET |
| 1321 | RMDLQIGTEK AEKNEGRMDA EKVEKMAAMK EKPAENTLFK AYPNKGVGQA NKPDETSKTS |
| 1381 | ILAVSDVSSS KPSIKAVIVS SPKAKATVSK TENQKSFPKS VPRDQINAEK KLSAKEFGLL |
| 1441 | KPTSARSGLA ESSSKFKPTQ SSLTRGGSGR ISALQGKLSK LDYRDITKQS QETEARPSIM |
| 1501 | KRDDSNNKTL AEQNTKNPKS TTGRSSKSKE EPLFPFNLDE FVTVDEVIEE VNPSQAKQNP |
| 1561 | LKGKRKETLK NVPFSELNLK KKKGKTSTPR GVEGELSFVT LDEIGEEEDA AAHLAQALVT |
| 1621 | VDEVIDEEEL NMEEMVKNSN SLFTLDELID QDDCISHSEP KDVTVLSVAE EQDLLKQERL |
| 1681 | VTVDEIGEVE ELPLNESADI TFATLNTKGN EGDTVRDSIG FISSQVPEDP STLVTVDEIQ |
| 1741 | DDSSDLHLVT LDEVTEEDED SLADFNNLKE ELNFVTVDEV GEEEDGDNDL KVELAQSKND |
| 1801 | HPTDKKGNRK KRAVDTKKTK LESLSQVGPV NENVMEEDLK TMIERHLTAK TPTKRVRIGK |
| 1861 | TLPSEKAVVT EPAKGEEAFQ MSEVDEESGL KDSEPERKRK KTEDSSSGKS VASDVPEELD |
| 1921 | FLVPKAGFFC PICSLFYSGE KAMTNHCKST RHKQNTEKFM AKQRKEKEQN EAEERSSR. |

[0657] Embodiment 192. The composition of any one of embodiments 1-191, wherein the composition further comprises (a) a sequence comprising a gRNA that specifically binds within an RNA molecule and (b) a sequence encoding a nuclease.
[0658] Embodiment 193. The composition of embodiment 192, wherein the nuclease comprises a sequence isolated or derived from a CRISPR/Cas protein.
[0659] Embodiment 194. The composition of embodiment 193, wherein the CRISPR/Cas protein is isolated or derived from any one of a type I, a type IA, a type IB, a type IC, a type ID, a type IE, a type IF, a type IU, a type III, a type IIIA, a type IIIB, a type IIIC, a type HID, a type IV, a type IVA, a type IVB, a type II, a type IIA, a type IIB, a type IIC, a type V, or a type VI CRISPR/Cas protein.
[0660] Embodiment 195. The composition of embodiment 192, wherein the nuclease comprises a sequence isolated or derived from a TALEN or a nuclease domain thereof.
[0661] Embodiment 196. The composition of embodiment 192, wherein the nuclease comprises a sequence isolated or derived from a zinc finger nuclease or a nuclease domain thereof.
[0662] Embodiment 197. The composition of any one of embodiments 191-196, wherein the target sequence comprises a sequence encoding a component of an adaptive immune response.
[0663] Embodiment 198. A vector comprising the composition of any one of embodiments 1-197.
[0664] Embodiment 199. The vector of embodiment 198, wherein the vector is a viral vector.
[0665] Embodiment 200. The vector of embodiment 199, wherein the vector comprises a sequence isolated or derived from a lentivirus, an adenovirus, an adeno-associated virus (AAV) vector, or a retrovirus.
[0666] Embodiment 201. The vector of embodiment 199 or 200, wherein the vector is replication incompetent.
[0667] Embodiment 202. The vector of embodiment any one of embodiments 100-201, wherein the vector comprises a sequence isolated or derived from an adeno-associated vector (AAV).
[0668] Embodiment 203. The vector of embodiment 202, wherein the adeno-associated virus (AAV) is an isolated AAV.
[0669] Embodiment 204. The vector of embodiment 202 or 203, wherein the adeno-associated virus (AAV) is a self-complementary adeno-associated virus (scAAV).
[0670] Embodiment 205. The vector of any one of embodiments 202-204, wherein the adeno-associated virus (AAV) is a recombinant adeno-associated virus (rAAV).
[0671] Embodiment 206. The vector of any one of embodiments 202-205, wherein the adeno-associated virus (AAV) comprises a sequence isolated or derived from an AAV of serotype AAV1, AAV2, AAV3, AAV4, AAV5, AAV6, AAV7, AAV8, AAV9, AAV10, AAV11, or AAV12.
[0672] Embodiment 207. The vector of any one of embodiments 202-206, wherein the adeno-associated virus (AAV) comprises a sequence isolated or derived from an AAV of serotype AAV9.
[0673] Embodiment 208. The vector of any one of embodiments 202-206, wherein the adeno-associated virus (AAV) comprise a sequence isolated or derived from Anc80
[0674] Embodiment 209. The vector of any one of embodiments 100-201, wherein the vector is a retrovirus.
[0675] Embodiment 210. The vector of embodiment any one of claims 100-201, wherein the retrovirus is a lentivirus.
[0676] Embodiment 211. The vector of embodiment 198, wherein the vector is a non-viral vector.
[0677] Embodiment 212. The vector of embodiment 211, wherein the non-viral vector comprises a nanoparticle, a micelle, a liposome or lipoplex, a polymersome, a polyplex or a dendrimer.
[0678] Embodiment 213. A composition comprising the vector of any one of embodiments 198-212.
[0679] Embodiment 214. A cell comprising the vector of any one of embodiments 198-212.
[0680] Embodiment 215. A cell comprising the composition of embodiment 214.
[0681] Embodiment 216. The cell of embodiment 214 or 215, wherein the cell is a mammalian cell.
[0682] Embodiment 217. The cell of embodiment 216, wherein the cell is a human cell.
[0683] Embodiment 218. The cell of any one of embodiments 215-217, wherein the cell is an immune cell.
[0684] Embodiment 219. The cell of embodiment 218, wherein the immune cell is a T lymphocyte (T-cell).
[0685] Embodiment 220. The cell of embodiment 219, wherein the T-cell is an effector T-cell, a helper T-cell, a memory T-cell, a regulatory T-cell, a natural Killer T-cell, a mucosal-associated invariant T-cell, or a gamma delta T cell.
[0686] Embodiment 221. The cell of any one of embodiments 215-217, wherein the immune cell is an antigen presenting cell.
[0687] Embodiment 222. The cell of embodiment 221, wherein the antigen presenting cell is a dendritic cell, a macrophage, or a B cell.
[0688] Embodiment 223. The cell of embodiment 221, wherein the antigen presenting cell is a somatic cell.
[0689] Embodiment 224. The cell of any one of embodiments 215-223, wherein the cell is a healthy cell.
[0690] Embodiment 225. The cell of any one of embodiments 215-223, wherein the cell is not a healthy cell.
[0691] Embodiment 226. The cell of embodiment 225, where the cell is isolated or derived from a subject having a disease or disorder.
[0692] Embodiment 227. A composition comprising the cell of any one of embodiments 215-226.
[0693] Embodiment 228. A method of masking a cell from an adaptive immune response comprising contacting a composition of any one of embodiments 1-197, 213 or 227 to the cell to produce a modified cell, wherein the composition modifies a level of expression of an RNA molecule of the modified cell and wherein the RNA molecule encodes a component of an adaptive immune response.
[0694] Embodiment 229. The method of embodiment 228, wherein the cell is in vivo, in vitro, ex vivo or in situ.
[0695] Embodiment 230. The method of embodiment 228, wherein the cell is in vitro or ex vivo.
[0696] Embodiment 231. The method of any one of embodiments 228-230, wherein a plurality of cells comprises the cell.
[0697] Embodiment 232. The method of embodiment 231, wherein each cell of the plurality of cells contacts the composition, thereby producing a plurality of modified cells.
[0698] Embodiment 233. The method of any one of embodiments 228-230, wherein the method further comprises administering the modified cell to a subject.
[0699] Embodiment 234. The method of any one of embodiments 231-232, wherein the method further comprises administering the plurality of modified cells to a subject.
[0700] Embodiment 235. The method of embodiment 233, wherein the cell is autologous.
[0701] Embodiment 236. The method of embodiment 233, wherein the cell is allogeneic.
[0702] Embodiment 237. The method of embodiment 233, wherein the plurality of modified cells is autologous.
[0703] Embodiment 238. The method of embodiment 233, wherein the plurality of modified cells is allogeneic.
[0704] Embodiment 239. The method of any one of embodiments 228-238, wherein the component of an adaptive immune response comprises or consists of a component of a type I major histocompatibility complex (MHC I), a type II major histocompatibility complex (MHC II), a T-cell receptor (TCR), a costimulatory molecule or a combination thereof.
[0705] Embodiment 240. The method of embodiment 239, wherein the MHC I component comprises an α1 chain, an α2 chain, an α3 chain, or a β2M protein.
[0706] Embodiment 241. The method of any one of embodiments 228-238, wherein the component of an adaptive immune response comprises or consists of an MHC I β2M protein.
[0707] Embodiment 242. The method of embodiment 239, wherein the MHC II component comprises an α1 chain, an α2 chain, a β1 chain, or a β2 chain.
[0708] Embodiment 243. The method of embodiment 239, wherein the TCR component comprises an α-chain and a β-chain.
[0709] Embodiment 244. The method of embodiment 239, wherein the costimulatory molecule comprises a Cluster of Differentiation 28 (CD28), a Cluster of Differentiation 80 (CD80), a Cluster of Differentiation 86 (CD86), an Inducible T-cell COStimulator (ICOS), or an ICOS Ligand (ICOSLG) protein.
[0710] Embodiment 245, A method of preventing or reducing an adaptive immune response in a subject comprising administering a therapeutically effective amount of a composition of any one of embodiments 1-197, 213 or 227 to the subject, wherein the composition contacts at least one cell in the subject producing a modified cell, wherein the composition modifies a level of expression of an RNA molecule of the modified cell and wherein the RNA molecule encodes a component of an adaptive immune response.
[0711] Embodiment 246. A method of treating a disease or disorder in a subject comprising administering a therapeutically effective amount of a composition of any one of embodiments 1-197, 213 or 227 to the subject, wherein the composition contacts at least one cell in the subject producing a modified cell, wherein the composition modifies a level of expression of an RNA molecule of the modified cell and wherein the composition prevents or reduces an adaptive immune response to the modified cell.
[0712] Embodiment 247. The method of embodiment 246, wherein the component of an adaptive immune response comprises or consists of a component of a type I major histocompatibility complex (MHC I), a type II major histocompatibility complex (MHC II), a T-cell receptor (TCR), a costimulatory molecule or a combination thereof.
[0713] Embodiment 248. The method of embodiment 247, wherein the MHC I component comprises an α1 chain, an α2 chain, an α3 chain, or a β2M protein.
[0714] Embodiment 249. The method of embodiment 247 or 248, wherein the component of an adaptive immune response comprises or consists of an MHC I β2M protein.
[0715] Embodiment 250. The method of embodiment 249, wherein the MHC II component comprises an α1 chain, an α2 chain, a β1 chain, or a β2 chain.
[0716] Embodiment 251. The method of embodiment 247, wherein the TCR component comprises an α-chain and a β-chain.
[0717] Embodiment 252. The method of embodiment 247, wherein the costimulatory molecule comprises a Cluster of Differentiation 28 (CD28), a Cluster of Differentiation 80 (CD80), a Cluster of Differentiation 86 (CD86), an Inducible T-cell COStimulator (ICOS), or an ICOS Ligand (ICOSLG) protein.
[0718] Embodiment 253. The method of any one of embodiments 246-252, wherein the disease or disorder is a genetic disease or disorder.
[0719] Embodiment 254. The method of embodiment 253, wherein the disease or disorder is a single gene genetic disease or disorder.
[0720] Embodiment 255. The method of embodiment 254, wherein the disease or disorder results from microsatellite instability.
[0721] Embodiment 256. The method of embodiment 255, wherein the microsatellite instability occurs in a DNA sequence at least 1, 2, 3, 4, 5 or 6 repeated motifs.
[0722] Embodiment 257. The method of embodiment 256, wherein an RNA molecule comprises a transcript of the DNA sequence and wherein the composition binds to a target sequence of the RNA molecule comprising at least 1, 2, 3, 4, 5, or 6 repeated motifs.
[0723] Embodiment 258. The method of any one of embodiments 246-257, wherein the composition is administered systemically.
[0724] Embodiment 259. The method of embodiment 259, wherein the composition is administered intravenously.
[0725] Embodiment 260. The method of embodiment 258 or 259, wherein the composition is administered by an injection or an infusion.
[0726] Embodiment 261. The method of any one of embodiments 246-257, wherein the composition is administered locally.
[0727] Embodiment 262. The method of embodiment 261, wherein the composition is administered by an intraosseous, intraocular, intracerebral, or intraspinal route.
[0728] Embodiment 263. The method of embodiment 261 or 262, wherein the composition is administered by an injection or an infusion.
[0729] Embodiment 264. The method of any one of embodiments 265-263, wherein the therapeutically effective amount is a single dose.
[0730] Embodiment 265. The method of any one of embodiments 265-264, wherein the composition is non-genome integrating.

### INCORPORATION BY REFERENCE

[0731] Every document cited herein, including any cross referenced or related patent or application is hereby incorporated herein by reference in its entirety unless expressly excluded or otherwise limited. The citation of any document is not an admission that it is prior art with respect to any invention disclosed or claimed herein or that it alone, or in any combination with any other reference or references, teaches, suggests or discloses any such invention. Further, to the extent that any meaning or definition of a term in this document conflicts with any meaning or definition of the same term in a document incorporated by reference, the meaning or definition assigned to that term in this document shall govern.

### OTHER EMBODIMENTS

[0732] While particular embodiments of the disclosure have been illustrated and described, various other changes and modifications can be made without departing from the spirit and scope of the disclosure. The scope of the appended claims includes all such changes and modifications that are within the scope of this disclosure.

1. A composition comprising a nucleic acid sequence comprising a guide RNA (gRNA) sequence that specifically binds a target RNA sequence, wherein the target RNA sequence encodes a protein component of an adaptive immune response, and wherein the gRNA sequence comprises a spacer sequence comprising a portion of a nucleic acid sequence encoding the protein component, and wherein the protein component is selected from the group consisting of Beta-2-microglobulin (β2M), Human Leukocyte Antigen A (HLA-A), Human Leukocyte Antigen B (HLA-B), Human Leukocyte Antigen C (HLA-C), Cluster of Differentiation 28 (CD28), Cluster of Differentiation 80 (CD80), Cluster of Differentiation 86 (CD86), Inducible T-cell Costimulator (ICOS), ICOS Ligand (ICOSLG), OX40L, Interleukin 12 (IL12), and CC Chemokine Receptor 7 (CCR7).

2. The composition of claim 1, wherein the adaptive immune response is selected from the group consisting of type I major histocompatibility complex (MHC I), type II major histocompatibility complex (MHC II), T-cell receptor (TCR), costimulatory molecule and a combination thereof.

3. (canceled)

4. The composition of claim 1, wherein the spacer sequence and the target RNA sequence are reverse complements of one another.

5. The composition of claim 1, wherein the gRNA sequence comprises a scaffold sequence that specifically binds to a CRISPR/Cas polypeptide or portion thereof.

6. The composition of claim 5, wherein the CRISPR/Cas polypeptide or portion thereof is selected from the group consisting of Cas9, Cpf1, Cas13a, Cas13b, Cas13c and CasRX/Cas13d, wherein the CRISPR/Cas polypeptide has native, reduced or null activity.

7. The composition of claim 1, wherein the nucleic acid sequence comprises a promoter which drives expression of the gRNA sequence.

8. The composition of claim 7, wherein the promoter is selected from the group consisting of a polymerase III promoter and a tRNA promoter.

9. (canceled)

10. The composition of claim 1, wherein the spacer sequence is a first spacer sequence that specifically binds a first target RNA sequence, and wherein the composition further comprises a second spacer sequence which specifically binds a second target RNA sequence, wherein the first spacer sequence and the second spacer sequence bind different target RNA sequences.

11. The composition of claim 10, wherein the gRNA sequence is a first gRNA sequence, and wherein the second spacer sequence is comprised within a second gRNA sequence.

12. The composition of claim 10, wherein the second target RNA sequence encodes a protein component of an adaptive immune response.

13. The composition of claim 10, wherein the second spacer sequence comprises a portion of a nucleic acid sequence encoding a protein component is selected from the group consisting of Beta-2-microglobulin (β2M), Human Leukocyte Antigen A (HLA-A), Human Leukocyte Antigen B (HLA-B), Human Leukocyte Antigen C (HLA-C), Cluster of Differentiation 28 (CD28), Cluster of Differentiation 80 (CD80), Cluster of Differentiation 86 (CD86), Inducible T-cell Costimulator (ICOS), ICOS Ligand (ICOSLG), OX40L, Interleukin 12 (IL12), and CC Chemokine Receptor 7 (CCR7).

14. The composition of claim 10, wherein the second spacer sequence comprises at least 1, 2, 3, 4, 5, 6, or 7 repeats of a nucleic acid sequence selected from the group consisting of: CUG (SEQ ID NO: 18), CCUG (SEQ ID NO: 19), CAG (SEQ ID NO: 80), GGGGCC (SEQ ID NO: 81), and a combination thereof.

15. A composition comprising a nucleic acid sequence comprising: (a) a first guide RNA (gRNA) sequence that specifically binds a first target RNA sequence, and (b) a second gRNA that specifically binds a second target RNA sequence, wherein the first target RNA sequence encodes a protein component of an adaptive immune response, and wherein the first gRNA sequence comprises a spacer sequence comprising a portion of a nucleic acid sequence encoding the protein component, and wherein the protein component is selected from the group consisting of Beta-2-microglobulin (β2M), Human Leukocyte Antigen A (HLA-A), Human Leukocyte Antigen B (HLA-B), Human Leukocyte Antigen C (HLA-C), Cluster of Differentiation 28 (CD28), Cluster of Differentiation 80 (CD80), Cluster of Differentiation 86 (CD86), Inducible T-cell Costimulator (ICOS), ICOS Ligand (ICOSLG), OX40L, Interleukin 12 (IL12), and CC Chemokine Receptor 7 (CCR7).

16. (canceled)

17. (canceled)

18. A composition comprising a nucleic acid sequence comprising: (a) a first guide RNA (gRNA) that specifically binds a first target RNA sequence within a first RNA molecule, wherein the first target RNA sequence encodes a protein component of an adaptive immune response (b) a second guide RNA (gRNA) that specifically binds a second target RNA sequence within a second RNA molecule and (c) a nucleic acid sequence encoding a fusion protein, wherein the fusion protein comprises a first RNA-binding polypeptide a second RNA-binding polypeptide, wherein neither the first RNA-binding polypeptide nor the second RNA-binding polypeptide comprises a significant DNA-nuclease activity, wherein the first RNA-binding polypeptide and the second RNA-binding polypeptide are not identical, and wherein the second RNA-binding polypeptide comprises an RNA-nuclease activity.

19.-26. (canceled)

27. A vector comprising the composition of claim 18.

28. The vector of claim 27, wherein the vector is selected from the group consisting of: adeno-associated virus, retrovirus, lentivirus, adenovirus, nanoparticle, micelle, liposome, lipoplex, polymersome, polyplex, and dendrimer.

29. A cell comprising the vector of claim 28.

30. The composition of claim 18, wherein the second RNA-binding polypeptide is selected from the group consisting of: RNAse1, RNAse4, RNAse6, RNAse7, RNAse8, RNAse2, RNAse6PL, RNAseL, RNAseT2, RNAse11, RNAseT2-like, NOB1, ENDOV, ENDOG, ENDOD1, hFEN1, hSLFN14, hLACTB2, APEX2, ANG, HRSP12, ZC3H12A, RIDA, PDL6, NTHL, KIAA0391, APEX1, AGO2, EXOG, ZC3H12D, ERN2, PELO, YBEY, CPSF4L, hCG_2002731, ERCC1, RAC1, RAA1, RAB1, DNA2, FLJ35220, FLJ13173, ERCC4, RNAse1(K41R), RNAse1(K41R, D121E), RNAse1(K41R, D121E, H119N), RNAse1(H119N), RNAse1(R39D, N67D, N88A, G89D, R91D, H119N), RNAse1(R39D, N67D, N88A, G89D, R91D, H119N, K41R, D121E), RNAse1(R39D, N67D, N88A, G89D, R91D), TENM1, TENM2, RNAseK, TALEN, ZNF638, and hSMG6 PIN.

The application's sequence listing, which the Patent Office published only in electronic form, follows.

SEQUENCE LISTING (14872 sequences)

SEQ ID NO: 1 - RNA, 20 nt, synthetic construct
  misc_feature 1..20: note = Space Sequence
  source 1..20: mol_type = other RNA
tggagcgagcatcccccaaa

SEQ ID NO: 2 - RNA, 21 nt, synthetic construct
  misc_feature 1..21: note = Space Sequence
  source 1..21: mol_type = other RNA
gtttgggggatgctcgctcca

SEQ ID NO: 3 - RNA, 20 nt, synthetic construct
  misc_feature 1..20: note = Space Sequence
  source 1..20: mol_type = other RNA
ccctcactgctggggagtcc

SEQ ID NO: 4 - RNA, 20 nt, synthetic construct
  misc_feature 1..20: note = Space Sequence
  source 1..20: mol_type = other RNA
ggactccccagcagtgaggg

SEQ ID NO: 5 - RNA, 20 nt, synthetic construct
  misc_feature 1..20: note = Space Sequence
  source 1..20: mol_type = other RNA
gcaactggatcaatttgctg

SEQ ID NO: 6 - RNA, 21 nt, synthetic construct
  misc_feature 1..21: note = Space Sequence
  source 1..21: mol_type = other RNA
gcagcaaattgatccagttgc

SEQ ID NO: 7 - RNA, 21 nt, synthetic construct
  misc_feature 1..21: note = Space Sequence
  source 1..21: mol_type = other RNA
gcattcttatctggtcagtgc

SEQ ID NO: 8 - RNA, 20 nt, synthetic construct
  misc_feature 1..20: note = Space Sequence
  source 1..20: mol_type = other RNA
gcactgaccagataagaatg

SEQ ID NO: 9 - RNA, 21 nt, synthetic construct
  misc_feature 1..21: note = Space Sequence
  source 1..21: mol_type = other RNA
gagcagcagcagcagcagcag

SEQ ID NO: 10 - RNA, 21 nt, synthetic construct
  misc_feature 1..21: note = Space Sequence
  source 1..21: mol_type = other RNA
gcaggcaggcaggcaggcagg

SEQ ID NO: 11 - RNA, 20 nt, synthetic construct
  misc_feature 1..20: note = Space Sequence
  source 1..20: mol_type = other RNA
gccccggccccggccccggc

SEQ ID NO: 12 - RNA, 93 nt, synthetic construct
  misc_feature 1..93: note = Scaffold Sequence
  source 1..93: mol_type = other RNA
gtttaagagctatgctggaaacagcatagcaagtttaaataaggctagtccgttatcaacttgaaaaagtggcaccgagtcggtgcttttttt

SEQ ID NO: 13 - RNA, 83 nt, synthetic construct
  misc_feature 1..83: note = Scaffold Sequence
  source 1..83: mol_type = other RNA
gttttagagctagaaatagcaagttaaaataaggctagtccgttatcaacttgaaaaagtggcaccgagtcggtgcttttttt

SEQ ID NO: 14 - RNA, 20 nt, synthetic construct
  misc_feature 1..20: note = Space Sequence
  source 1..20: mol_type = other RNA
gtgataagtggaatgccatg

SEQ ID NO: 15 - RNA, 20 nt, synthetic construct
  misc_feature 1..20: note = Space Sequence
  source 1..20: mol_type = other RNA
ctggtgaacttccgatagtg

SEQ ID NO: 16 - DNA, 20 bp, synthetic construct
  misc_feature 1..20: note = Space Sequence
  source 1..20: mol_type = other DNA
gagatatagcctggtggttc

SEQ ID NO: 17 - RNA, 73 nt, synthetic construct
  misc_feature 1..73: note = Scaffold Sequence
  source 1..73: mol_type = other RNA
ggacagcatagcaagttaaaataaggctagtccgttatcaacttgaaaaagtggcaccgagtcggtgcttttt

SEQ ID NO: 18-19 - skipped (2 entries)

SEQ ID NO: 20 - protein, 128 aa, unidentified
  REGION 1..128: note = RNAse1
KESRAKKFQRQHMDSDSSPSSSSTYCNQMMRRRNMTQGLCKPVNTFVHEPLVDVQNVCFQEKVTCKNGQGNCYKSNSSMHITDCRLTNGSRYPNCAYRTSPKERHIIVACEGSPYVPVHFDASVEDST

SEQ ID NO: 21 - protein, 119 aa, unidentified
  REGION 1..119: note = RNAse4
QDGMYQRFLRQHVHPEETGGSDRYCDLMMQRRKMTLYHCKRFNTFIHEDIWNIRSICSTTNIQCKNGKMNCHEGVVKVTDCRDTGSSRAPNCRYRAIASTRRVVIACEGNPQVPVHFDG

SEQ ID NO: 22 - protein, 127 aa, unidentified
  REGION 1..127: note = RNAse6
WPKRLTKAHWFEIQHIQPSPLQCNRAMSGINNYTQHCKHQNTFLHDSFQNVAAVCDLLSIVCKNRRHNCHQSSKPVNMTDCRLTSGKYPQCRYSAAAQYKFFIVACDPPQKSDPPYKLVPVHLDSIL

SEQ ID NO: 23 - protein, 155 aa, unidentified
  REGION 1..155: note = RNAse7
APARAGFCPLLLLLLLGLWVAEIPVSAKPKGMTSSQWFKIQHMQPSPQACNSAMKNINKHTKRCKDLNTFLHEPFSSVAATCQTPKIACKNGDKNCHQSHGPVSLTMCKLTSGKYPNCRYKEKRQNKSYVVACKPPQKKDSQQFHLVPVHLDRVL

SEQ ID NO: 24 - protein, 122 aa, unidentified
  REGION 1..122: note = RNAse8
TSSQWFKTQHVQPSPQACNSAMSIINKYTERCKDLNTFLHEPFSSVAITCQTPNIACKNSCKNCHQSHGPMSLTMGELTSGKYPNCRYKEKHLNTPYIVACDPPQQGDPGYPLVPVHLDKVV

SEQ ID NO: 25 - protein, 134 aa, unidentified
  REGION 1..134: note = RNAse2
KPPQFTWAQWFETQHINMTSQQCTNAMQVINNYQRRCKNQNTFLLTTFANVVNVCGNPNMTCPSNKTRKNCHHSGSQVPLIHCNLTTPSPQNISNCRYAQTPANMFYIVACDNRDQRRDPPQYPVVPVHLDRII

SEQ ID NO: 26 - protein, 216 aa, unidentified
  REGION 1..216: note = RNAse6PL
DKRLRDNHEWKKLIMVQHWPETVCEKIQNDCRDPPDYWTIHGLWPDKSEGCNRSWPFNLEEIKKNWMEITDSSLPSPSMGPAPPRWMRSTPRRSTLAEAWNSTGSWTSTGGCALPPAALPSGDLCCRPSLTAGSRGVGVDLTALHQLLHVHYSATGIIPEECSEPTKPFQIILHHDHTEWVQSIGMPIWGTISSSESAIGKNEESQPACAVLSHDS

SEQ ID NO: 27 - protein, 722 aa, unidentified
  REGION 1..722: note = RNAseL
AAVEDNHLLIKAVQNEDVDLVQQLLEGGANVNFQEEEGGWTPLHNAVQMSREDIVELLLRHGADPVLRKKNGATPFILAAIAGSVKDLLKLFLSKGADVNECDFYGFTAFMEAAVYGKVKALKFLYKRGANVNLRRKTKEDQERLRKGGATALMDAAEKGHVEVLKILLDEMGADVNACDNMGRNALIHALLSSDDSDVEAITHLLLDHGADVNVRGERGKTPLILAVEKKHLGLVQRLLEQEHIEINDTDSDGKTALLLAVELKLKKIAELLCKRGASTDCGDLVMTARRNYDHSLVKVLLSHGAKEDFHPPAEDWKPQSSHWGAALKDLHRIYRPMIGKLKFFIDEKYKIADTSEGGIYLGFYEKQEVAVKTFCEGSPRAQREVSCLQSSRENSHLVTFYGSESHRGHLFVCVTLCEQTLEACLDVHRGEDVENEEDEFARNVLSSIFKAVQELHLSCGYTHQDLQPQNILIDSKKAAHLADFDKSIKWAGDPQEVKRDLEDLGRLVLYVVKKGSISFEDLKAQSNEEVVQLSPDEETKDLIHRLFHPGEHVRDCLSDLLGHPFFWTWESRYRTLRNVGNESDIKTRKSESEILRLLQPGPSEHSKSFDKWTTKINECVMKKMNKFYEKRGNFYQNTVGDLLKFIRNLGEHIDEEKHKKMKLKIGDPSLYFQKTFPDLVIYVYTKLQNTEYRKHFPQTHSPNKPQCDGAGGASGLASPGC

SEQ ID NO: 28 - protein, 217 aa, unidentified
  REGION 1..217: note = RNAseT2
VQHWPETVCEKIQNDCRDPPDYWTIHGLWPDKSEGCNRSWPFNLEEIKDLLPEMRAYWPDVIHSFPNRSRFWKHEWEKHGTCAAQVDALNSQKKYFGRSLELYRELDLNSVLLKLGIKPSINYYQVADFKDALARVYGVIPKIQCLPPSQDEEVQTIGQIELCLTKQDQQLQNCTEPGEQPSPKQEVWLANGAAESRGLRVCEDGPVFYPPPKKTKH

SEQ ID NO: 29 - protein, 183 aa, unidentified
  REGION 1..183: note = RNAse11
EASESTMKIIKEEFTDEEMQYDMAKSGQEKQTIEILMNPILLVKNTSLSMSKDDMSSTLLTFRSLHYNDPKGNSSGNDKECCNDMTVWRKVSEANGSCKWSNNFIRSSTEVMRRVHRAPSCKFVQNPGISCCESLELENTVCQFTTGKQFPRCQYHSVTSLEKILTVLTGHSLMSWLVCGSKL

SEQ ID NO: 30 - protein, 185 aa, unidentified
  REGION 1..185: note = RNAseT2-like
  SITE 1: note = misc_feature - Xaa can be any naturally occurring amino acid
XLGGADKRLRDNHEWKKLIMVQHWPETVCEKIQNDCRDPPDYWTIHGLWPDKSEGCNRSWPFNLEEIKDLLPEMRAYWPDVIHSFPNRSRFWKHEWEKHGTCAAQVDALNSQKKYFGRSLELYRELDLNSVLLKLGIKPSINYYQTTEEDLNLDVEPTTEDTAEEVTIHVLLHSALFGEIGPRRW

SEQ ID NO: 31 - protein, 299 aa, unidentified
  REGION 1..299: note = NOB1
APVEHVVADAGAFLRHAALQDIGKNIYTIREVVTEIRDKATRRRLAVLPYELRFKEPLPEYVRLVTEFSKKTGDYPSLSATDIQVLALTYQLEAEFVGVSHLKQEPQKVKVSSSIQHPETPLHISGFHLPYKPKPPQETEKGHSACEPENLEFSSFMFWRNPLPNIDHELQELLIDRGEDVPSEEEEEEENGFEDRKDDSDDDGGGWITPSNIKQIQQELEQCDVPEDVRVGCLTTDFAMQNVLLQMGLHVLAVNGMLIREARSYILRCHGCFKTTSDMSRVFCSHCGNKTLKKVSVTV

SEQ ID NO: 32 - protein, 210 aa, unidentified
  REGION 1..210: note = ENDOV
AFSGLQRVGGVDVSFVKGDSVRACASLVVLSFPELEVVYEESRMVSLTAPYVSGFLAFREVPFLLELVQQLREKEPGLMPQVLLVDGNGVLHHRGFGVACHLGVLTDLPCVGVAKKLLQVDGLENNALHKEKIRLLQTRGDSFPLLGDSGTVLGMALRSHDRSTRPLYISVGHRMSLEAAVRLTCCCCRFRIPEPVRQADICSREHIRKS

SEQ ID NO: 33 - protein, 249 aa, unidentified
  REGION 1..249: note = ENDOG
AELPPVPGGPRGPGELAKYGLPGLAQLKSRESYVLCYDPRTRGALWVVEQLRPERLRGDGDRRECDFREDDSVHAYHRATNADYRGSGFDRGHLAAAANHRWSQKAMDDTFYLSNVAPQVPHLNQNAWNNLEKYSRSLTRSYQNVYVCTGPLFLPRTEADGKSYVKYQVIGKNHVAVPTHFFKVLILEAAGGQIELRTYVMPNAPVDEAIPLERFLVPIESIERASGLLFVPNILARAGSLKAITAGSK

SEQ ID NO: 34 - protein, 479 aa, unidentified
  REGION 1..479: note = ENDOD1
RLVGEEEAGFGECDKFFYAGTPPAGLAADSHVKICQRAEGAERFATLYSTRDRIPVYSAFRAPRPAPGGAEQRWLVEPQIDDPNSNLEEAINEAEAITSVNSLGSKQALNTDYLDSDYQRGQLYPFSLSSDVQVATFTLTNSAPMTQSFQERWYVNLHSLMDRALTPQCGSGEDLYILTGTVPSDYRVKDKVAVPEFVWLAACCAVPGGGWAMGFVKHTRDSDIIEDVMVKDLQKLLPFNPQLFQNNCGETEQDTEKMKKILEVVNQIQDEERMVQSQKSSSPLSSTRSKRSTLLPPEASEGSSSFLGKLMGFIATPFIKLFQLIYYLVVAILKNIVYFLWCVTKQVINGIESCLYRLGSATISYFMAIGEELVSIPWKVLKVVAKVIRALLRILCCLLKAICRVLSIPVRVLVDVATFPVYTMGAIPIVCKDIALGLGGTVSLLFDTAFGTLGGLFQVVFSVCKRIGYKVTFDNSGEL

SEQ ID NO: 35 - protein, 380 aa, unidentified
  REGION 1..380: note = hFEN1
MGIQGLAKLIADVAPSAIRENDIKSYFGRKVAIDASMSIYQFLIAVRQGGDVLQNEEGETTSHLMGMFYRTIRMMENGIKPVYVFDGKPPQLKSGELAKRSERRAEAEKQLQQAQAAGAEQEVEKFTKRLVKVTKQHNDECKHLLSLMGIPYLDAPSEAEASCAALVKAGKVYAAATEDMDCLTFGSPVLMRHLTASEAKKLPIQEFHLSRILQELGLNQEQFVDLCILLGSDYCESIRGIGPKRAVDLIQKHKSIEEIVRRLDPNKYPVPENWLHKEAHQLFLEPEVLDPESVELKWSEPNEEELIKFMCGEKQFSEERIRSGVKRLSKSRQGSTQGRLDDFFKVTGSLSSAKRKEPEPKGSTKKKAKTGAAGKFKRGK

SEQ ID NO: 36 - protein, 186 aa, Homo sapiens
ESTHVEFKRFTTKKVIPRIKEMLPHYVSAFANTQGGYVLIGVDDKSKEVVGCKWEKVNPDLLKKEIENCIEKLPTFHFCCEKPKVNFTTKILNVYQKDVLDGYVCVIQVEPFCCVVFAEAPDSWIMKDNSVTRLTAEQWVVMMLDTQSAPPSLVTDYNSCLISSASSARKSPGYPIKVHKFKEALQ

SEQ ID NO: 37 - protein, 262 aa, Homo sapiens
TLQGTNTYLVGTGPRRILIDTGEPAIPEYISCLKQALTEFNTAIQEIVVTHWHRDHSGGIGDICKSINNDTTYCIKKLPRNPQREEIIGNGEQQYVYLKDGDVIKTEGATLRVLYTPGHTDDHMALLLEEENAIFSGDCILGEGTTVFEDLYDYMNSLKELLKIKADIIYPGHGPVIHNAEAKIQQYISHRNIREQQILTLFRENFEKSFTVMELVKIIYKNTPENLHEMAKHNLLLHLKKLEKEGKIFSNTDPDKKWKAHL

SEQ ID NO: 38 - protein, 518 aa, Homo sapiens
MLRVVSWNINGIRRPLQGVANQEPSNCAAVAVGRILDELDADIVCLQETKVTRDALTEPLAIVEGYNSYFSFSRNRSGYSGVATFCKDNATPVAAEEGLSGLFATQNGDVGCYGNMDEFTQEELRALDSEGRALLTQHKIRTWEGKEKTLTLINVYCPHADPGRPERLVFKMRFYRLLQIRAEALLAAGSHVIILGDLNTAHRPIDHWDAVNLECFEEDPGRKWMDSLLSNLGCQSASHVGPFIDSYRCFQPKQEGAFTCWSAVTGARHLNYGSRLDYVLGDRTLVIDTFQASFLLPEVMGSDHCPVGAVLSVSSVPAKQCPPLCTRFLPEFAGTQLKILRFLVPLEQSPVLEQSTLQHNNQTRVQTCQNKAQVRSTRPQPSQVGSSRGQKNLKSYFQPSPSCPQASPDIELPSLPLMSALMTPKTPEEKAVAKVVKGQAKTSEAKDEKELRTSFWKSVLAGPLRTPLCGGHREPCVMRTVKKPGPNLGRRFYMCARPRGPPTDPSSRCNFFLWSRPS

SEQ ID NO: 39 - protein, 350 aa, Homo sapiens
MLRVVSWNINGIRRPLQGVANQEPSNCAAVAVGRILDELDADIVCLQETKVTRDALTEPLAIVEGYNSYFSFSRNRSGYSGVATFCKDNATPVAAEEGLSGLFATQNGDVGCYGNMDEFTQEELRALDSEGRALLTQHKIRTWEGKEKTLTLINVYCPHADPGRPERLVFKMRFYRLLQIRAEALLAAGSHVIILGDLNTAHRPIDHWDAVNLECFEEDPGRKWMDSLLSNLGCQSASHVGPFIDSYRCFQPKQEGAFTCWSAVTGARHLNYGSRLDYVLGDRTLVIDTFQASFLLPEVMGSDHCPVGAVLSVSSVPAKQCPPLCTRFLPEFAGTQLKILRFLVPLEQSP

SEQ ID NO: 40 - protein, 123 aa, Homo sapiens [sequence omitted]

SEQ ID NO: 41 - protein, 136 aa, Homo sapiens
SSLIRRVISTAKAPGAIGPYSQAVLVDRTIYISGQIGMDPSSGQLVSGGVAEEAKQALKNMGEILKAAGCDFTNVVKTTVLLADINDFNTVNEIYKQYFKSNFPARAAYQVAALPKGSRIEIEAVAIQGPLTTASL

SEQ ID NO: 42 - protein, 189 aa, Homo sapiens
GGGTPKAPNLEPPLPEEEKEGSDLRPVVIDGSNVAMSHGNKEVFSCRGILLAVNWFLERGHTDITVFVPSWRKEQPRPDVPITDQHILRELEKKKILVFTPSRRVGGKRVVCYDDRFIVKLAYESDGIVVSNDTYRDLQGERQEWKRFIEERLLMYSFVNDKFMPPDDPLGRHGPSLDNFLRKKPLTLE

SEQ ID NO: 43 - protein, 598 aa, Homo sapiens
SGPCGEKPVLEASPTMSLWEFEDSHSRQGTPRPGQELAAEEASALELQMKVDFFRKLGYSSTEIHSVLQKLGVQADTNTVLGELVKHGTATERERQTSPDPCPQLPLVPRGGGTPKAPNLEPPLPEEEKEGSDLRPVVIDGSNVAMSHGNKEVFSCRGILLAVNWFLERGHTDITVFVPSWRKEQPRPDVPITDQHILRELEKKKILVFTPSRRVGGKRVVCYDDRFIVKLAYESDGIVVSNDTYRDLQGERQEWKRFIEERLLMYSFVNDKFMPPDDPLGRHGPSLDNFLRKKPLTLEHRKQPCPYGRKCTYGIKCRFFHPERPSCPQRSVADELRANALLSPPRAPSKDKNGRRPSPSSQSSSLLTESEQCSLDGKKLGAQASPGSRQEGLTQTYAPSGRSLAPSGGSGSSFGPTDWLPQTLDSLPYVSQDCLDSGIGSLESQMSELWGVRGGGPGEPGPPRAPYTGYSPYGSELPATAAFSAFGRAMGAGHFSVPADYPPAPPAFPPREYWSEPYPLPPPTSVLQEPPVQSPGAGRSPWGRAGSLAKEQASVYTKLCGVFPPHLVEAVMGRFPQLLDPQQLAAEILSYKSQHPSE

SEQ ID NO: 44 - protein, 136 aa, Homo sapiens; identical to SEQ ID NO: 41

SEQ ID NO: 45 - protein, 966 aa, Ruminococcus flavefaciens
IEKKKSFAKGMGVKSTLVSGSKVYMTTFAEGSDARLEKIVEGDSIRSVNEGEAFSAEMADKNAGYKIGNAKFSHPKGYAVVANNPLYTGPVQQDMLGLKETLEKRYFGESADGNDNICIQVIHNILDIEKILAEYITNAAYAVNNISGLDKDIIGFGKFSTVYTYDEFKDPEHHRAAFNNNDKLINAIKAQYDEFDNFLDNPRLGYFGQAFFSKEGRNYIINYGNECYDILALLSGLAHWVVANNEEESRISRTWLYNLDKNLDNEYISTLNYLYDRITNELTNSFSKNSAANVNYIAETLGINPAEFAEQYFRFSIMKEQKNLGFNITKLREVMLDRKDMSEIRKNHKVFDSIRTKVYTMMDFVIYRYYIEEDAKVAAANKSLPDNEKSLSEKDIFVINLRGSFNDDQKDALYYDEANRIWRKLENIMHNIKEFRGNKTREYKKKDAPRLPRILPAGRDVSAFSKLMYALTMFLDGKEINDLLTTLINKFDNIQSFLKVMPLIGVNAKFVEEYAFFKDSAKIADELRLIKSFARMGEPIADARRAMYIDAIRILGTNLSYDELKALADTFSLDENGNKLKKGKHGMRNFIINNVISNKRFHYLIRYGDPAHLHEIAKNEAVVKFVLGRIADIQKKQGQNGKNQIDRYYETCIGKDKGKSVSEKVDALTKIITGMNYDQFDKKRSVIEDTGRENAEREKFKKIISLYLTVIYHILKNIVNINARYVIGFHCVERDAQLYKEKGYDINLKKLEEKGFSSVTKLCAGIDETAPDKRKDVEKEMAERAKESIDSLESANPKLYANYIKYSDEKKAEEFTRQINREKAKTALNAYLRNTKWNVIIREDLLRIDNKTCTLFANKAVALEVARYVHAYINDIAEVNSYFQLYHYIMQRIIMNERYEKSSGKVSEYFDAVNDEKKYNDRLLKLLCVPFGYCIPRFKNLSIEALFDRNEAAKFDKEKKKVSGNS

SEQ ID NO: 46 - protein, 1034 aa, unidentified
  REGION 1..1034: note = Cas13d (contig e-k87 11092736)
MKRQKTFAKRIGIKSTVAYGQGKYAITTFGKGSKAEIAVRSADPPEETLPTESDATLSIHAKFAKAGRDGREFKCGDVDETRIHTSRSEYESLISNPAESPREDYLGLKGTLERKFFGDEYPKDNLRIQIIYSILDIQKILGLYVEDILHFVDGLQDEPEDLVGLGLGDEKMQKLLSKALPYMGFFGSTDVFKVTKKREERAAADEHNAKVFRALGAIRQKLAHFKWKESLAIFGANANMPIRFFQGATGGRQLWNDVIAPLWKKRIERVRKSFLSNSAKNLWVLYQVFKDDTDEKKKARARQYYHFSVLKEGKNLGFNLTKTREYFLDKFFPIFHSSAPDVKRKVDTFRSKFYAILDFIIYEASVSVANSGQMGKVAPWKGAIDNALVKLREAPDEEAKEKIYNVLAASIRNDSLFLRLKSACDKFGAEQNRPVFPNELRNNRDIRNVRSEWLEATQDVDAAAFVQLIAFLCNFLEGKEINELVTALIKKFEGIQALIDLLRNLEGVDSIRFENEFALFNDDKGNMAGRIARQLRLLASVGKMKPDMTDAKRVLYKSALEILGAPPDEVSDEWLAENILLDKSNNDYQKAKKTVNPFRNYIAKNVITSRSFYYLVRYAKPTAVRKLMSNPKIVRYVLKRLPEKQVASYYSAIWTQSESNSNEMVKLIEMIDRLTTEIAGFSFAVLKDKKDSIVSASRESRAVNLEVERLKKLTTLYMSIAYIAVKSLVKVNARYFIAYSALERDLYFFNEKYGEEFRLHFIPYELNGKTCQFEYLAILKYYLARDEETLKRKCEICEEIKVGCEKHKKNANPPYEYDQEWIDKKKALNSERKACERRLHFSTHWAQYATKRDENMAKHPQKWYDILASHYDELLALQATGWLATQARNDAEHLNPVNEFDVYIEDLRRYPEGTPKNKDYHIGSYFEIYHYIRQRAYLEEVLAKRKEYRDSGSFTDEQLDKLQKILDDIRARGSYDKNLLKLEYLPFAYNLPRYKNLTTEALFDDDSVSGKKRVAEWREREKTREAEREQRRQR

SEQ ID NO: 47 - DNA, 30 bp, unidentified
  misc_feature 1..30: note = contig e-k87 11092736
  source 1..30: mol_type = other DNA
gtgagaagtctccttatggggagatgctac

SEQ ID NO: 48 - protein, 1022 aa, unidentified
  REGION 1..1022: note = Cas13d (160582958 gene49834)
MKNSVTFKLIQAQENKEAARKKAKDIAEQARIAKRNGVVKKEENRINRIQIEIQTQKKSNTQNAYHLKSLAKAAGVKSVFAIGNDLLMTGFGPGNDATIEKRVFQNRAIETLSSPEQYSAEFQNKQFKIKGNIKVLNHSTQKMEEIQTELQDNYNRPHFDLLGCKNVLEQKYFGRTFSDNIHVQIAYNIMDIEKLLTPYINNIIYTLNELMRDNSKDDFFGCDSHFSVAYLYDELKAGYSDRLKTKPNLSKNIDRIWNNFCNYMNSDSGNTEARLAYFGELFYKPKETGDAKSDYKTHLSNNQKEEWELKSDKEVYNIFAILCDLRHFCTHGESITPSGKPFPYNLEKNLFPEAKQVLNSLFEEKAESLGAEAFGKTAGKTDVSILLKVFEKEQASQKEQQALLKEYYDFKVQKTYKNMGFSIKKLREAIMEIPDAAKFKDDLYSSLRHKLYGLFDFILVKHFLDTSDSENLQNNDIFRQLRACRCEEEKDQVYRSIAVKVWEKVKKKELNMFKQVVVIPSLSKDELKQMEMTKNTELLSSIETISTQASLFSEMIFMMTYLLDGKEINLLCTSLIEKFENIASFNEVLKSPQIGYETKYTEGYAFFKNADKTAKELRQVNNMARMTKPLGGVNTKCVMYNEAAKILGAKPMSKAELESVFNLDNHDYTYSPSGKKIPNKNFRNFIINNVITSRRFLYLIRYGNPEKIRKIAINPSIISFVLKQIPDEQIKRYYPPCIGKRTDDVTLMRDELGKMLQSVNFEQFSRVNNKQNAKQNPNGEKARLQACVRLYLTVPYLFIKNMVNINARYVLAFHCLERDHALCFNSRKLNDDSYNEMANKFQMVRKAKKEQYEKEYKCKKQETGTAHTKKIEKLNQQIAYIDKDIKNMHSYTCRNYRNLVAHLNVVSKLQNYVSELPNDYQITSYFSFYHYCMQLGLMEKVSSKNIPLVESLKNEANDAQSYSAKKTLEYFDLIEKNRTYCKDFLKALNAPFSYNLPRFKNLSIEALFDKNIVYEQADLKKE

SEQ ID NO: 49 - DNA, 36 bp, unidentified
  misc_feature 1..36: note = Cas13d (160582958 gene49834)
  source 1..36: mol_type = other DNA
gaactacacccctctgttcttgtaggggtctaacac

SEQ ID NO: 50 - protein, 877 aa, unidentified
  REGION 1..877: note = Cas13d (contig tpg DJXD01000002.1
MKKQKSKKTVSKTSGLKEALSVQGTVIMTSFGKGNMANLSYKIPSSQKPQNLNSSAGLKNVEVSGKKIKFQGRHPKIATTDNPLFKPQPGMDLLCLKDKLEMHYFGKTFDDNIHIQLIYQILDIEKILAVHVNNIVFTLDNVLHPQKEELTEDFIGAGGWRINLDYQTLRGQTNKYDRFKNYIKRKELLYFGEAFYHENERRYEEDIFAILTLLSALRQFCFHSDLSSDESDHVNSFWLYQLEDQLSDEFKETLSILWEEVTERIDSEFLKTNTVNLHILCHVFPKESKETIVRAYYEFLIKKSFKNMGFSIKKLREIMLEQSDLKSFKEDKYNSVRAKLYKLFDFIITYYYDHHAFEKEALVSSLRSSLTEENKEEIYIKTARTLASALGADFKKAAADVNAKNIRDYQKKANDYRISFEDIKIGNTGIGYFSELIYMLTLLLDGKEINDLLTTLINKFDNIISFIDILKKLNLEFKFKPEYADFFNMTNCRYTLEELRVINSIARMQKPSADARKIMYRDALRILGMDNRPDEEIDRELERTMPVGADGKFIKGKQGFRNFIASNVIESSRFHYLVRYNNPHKTRTLVKNPNVVKFVLEGIPETQIKRYFDVCKGQEIPPTSDKSAQIDVLARIISSVDYKIFEDVPQSAKINKDDPSRNFSDALKKQRYQAIVSLYLTVMYLITKNLVYVNSRYVIAFHCLERDAFLHGVTLPKMNKKIVYSQLTTHLLTDKNYTTYGHLKNQKGHRKWYVLVKNNLQNSDITAVSSFRNIVAHISVVRNSNEYISGIGELHSYFELYHYLVQSMIAKNNWYDTSHQPKTAEYLNNLKKHHTYCKDFVKAYCIPFGYVVPRYKNLTINELFDRNNPNPEPKEEV

SEQ ID NO: 51 - DNA, 36 bp, Homo sapiens
  source 1..36: mol_type = genomic DNA
caactacaaccccgtaaaaatacggggttctgaaac

SEQ ID NO: 52-53 - skipped (2 entries)

SEQ ID NO: 54 - protein, 124 aa, unidentified
  REGION 1..124: note = CasRX/Cas13d Gut metagenome contig6049000251
LYLTSFGKGNAAVIEQKIEPENGYRVTGMQITPSITVNKATDESVRFRVKRKIAQKDEFIADNPMHEGRHRIEPSAGSDMLGLKTKLEKYYFGKEFDDNLHIQIIYNILDIEKILAVYSTNITA

SEQ ID NO: 55-56 - skipped (2 entries)

SEQ ID NO: 57 - protein, 358 aa, unidentified
  REGION 1..358: note = CasRX/Cas13d Gut metagenome contig546000275
MDSYRPKLYKLIDFCIFKHYHEYTEISEKNVDTLRAAVSEEQKESFYADEAKRLWGIFDKQFLGFCKKINVWVNGSHEKEILGYIDKDAYRKKSDVSYFSKFLYAMSFFLDGKEINDLLTTLINKFDNIASFISTAKELDAEIDRILEKKLDPVTGKPLKGKNSFRNFIANNVIENKRFIYVIKFCNPKNVLKLVKNTKVTEFVLKRMPESQIDRYYSSCIDTEKNPSVDKKISDLAEMIKKIAFDDFRNVRQKTRTREESLEKERFKAVIGLYLTVVYLLIKNLVNVNSRYVMAFHCLERDAKLYGINIGKNYIELTEDLCRENENSRSAYLARNKRLRDCVKQNIDNAKNMKSKEK

SEQ ID NO: 58-60 - skipped (3 entries)

SEQ ID NO: 61 - protein, 149 aa, unidentified
  REGION 1..149: note = CasRX/Cas13d Gut metagenome contig4114000374
DTKINPQTWLYQLENTPDLDNEYRDTLDHFFDERFNEINEHFVTQNATNLCIMKEVFPDEDFKSIADLYYDFIVVKSYKNIGFSIKKLREKMLELPEAKRVTSTEMDSVRSKLYKLIDFCIFKHYHEKPETVEMIVSMLRAYTSEDMKE

SEQ ID NO: 62-66 - skipped (5 entries)

SEQ ID NO: 67 - protein, 320 aa, unidentified
  REGION 1..320: note = CasRX/Cas13d Gut metagenome contig721000619
KEGSTMAKNEKKKSTAKALGLKSSFVVNNDIYMTSFGKGNKAVLEKKITENTIENKSDTTYFDVINRDPKGFTLEGRRIADMTAFSNDPKYHVNVVNGKFLEDQLGARSELEKKVFGRTFDDNVHIQLIHNILDIEKIMAQYVSDIVYLLHNTIKRDMNDDIMGYISIRNSFDDFCHPERIPDRKAKDNLQKQHDIFFDEILKCGRLAYFGNAFFEDGSDNKEIAKLKRYKEIYHIIALMGSLRQSYFHGENSDKNFQGPTWAYTLESNLTGKYKEFKDTLDKTFDERYEMISKDFGSTNMVNLQILEELLKMLYGNVSP

SEQ ID NO: 68 - skipped

SEQ ID NO: 69 - protein, 204 aa, unidentified
  REGION 1..204: note = CasRX/Cas13d Gut metagenome contig2002000411
EKQNKAKYQAIISLYLMVMYQIVKNMIYVNSRYVIAFHCLERDSNQLLGRFNSRDASMYNKLTQKFITDKYLNDGAQGCSKKVGNYLSHNITCCSDELRKEYRNQVDHFAVVRMIGKYAADIGKFSTWFELYHYVMQRIIFDKRNPLSETERTYKQLIAKHHTYCKDLVKALNTPFGYNLARYKNLSIGELFDRNNYNAKTKET

SEQ ID NO: 70 - skipped

SEQ ID NO: 71 - protein, 449 aa, unidentified
  REGION 1..449: note = CasRX/Cas13d Gut metagenome contig13552000311
LIDFLIYDLYYNRKPARIEEIVDKLRESVNDEEKESIYSAETKYVYEALGKVLVRSLKKYLNGATIRDLKNRYDAKTANRIWDISEHSKSGHVNCFCKLIYMMTLMLDGKEINDLLTTLVNKFDNIASFIDVMDELGLEHSFTDNYKMFADSKAICLDLQFINSFARMSKIDDEKSKRQLFRDALVVLDIGDKNEDWIEKYLTSDIFKRDENGNKIDGEKRDFRNFIANNVIKSARFKYLVKYSSADGMIKLKKNEKLISFVLEQLPETQIDRYYESCGLDCAVADRKVRIEKLTGLIRDMRFDNFRGVNYSNDACKKDKQAKAKYQAIISLYLMVLYQIVKNMIYVNSRYVIAFHCLERDLLFFNIELDNSYQYSNCNELTEKFIKDKYMKEGALGFNMKAGRYLTKNIGNCSNELRKIYRNQVDHFAVVRKIGNYAADIASVGSWFE

SEQ ID NO: 72 - protein, 96 aa, unidentified
  REGION 1..96: note = CasRX/Cas13d Gut metagenome contig10037000527
YMDQNFANSDAWAIHVYRNKIQHLDAVRHADMYIGDIREFHSWFELYHYIIQRRIIDQYAYESTPGSSRDGSAIIDEERLNPATRRYFRLITTYKT

SEQ ID NO: 73 - protein, 519 aa, unidentified
  REGION 1..519: note = CasRX/Cas13d Gut metagenome contig238000329
RYDKDRSKIYTMMDFVIYRYYIDNNNDSIDFINKLRSSIDEKSKEKLYNEEANRLWNKLKEYMLYIKEFNGKLASRTPDRDGNISEFVESLPKIHRLLPRGQKISNFSKLMYLLTMFLDGKEINDLLTTLINKFENIQGFLDIMPEINVNAKFEPEYVFFNKSHEIAGELKLIKGFAQMGEPAATLKLEMTADAIKILGTEKEDAELIKLAESLFKDENGKLLGNKQHGMRNFIGNNVIKSKRFHYLIRYGDPAHLHKIATNKNVVRFVLGRIADMQKKQGQKGKNQIDRYYEVCVGNKDIKKTIEEKIDALTDIIVNMNYDQFEKKKAVIENQNRGKTFEEKNKYKRDNAEREKFKKIISLYLTVIYHILKNIVNVNSRYILGFHCLERDKQLYIEKYNKDKLDGFVALTKFCLGDEERYEDLKAKAQASIQALETANPKLYAKYMNYSDEEKKEEFKKQLNRERVKNARNAYLKNIKNYIMIRLQLRDQTDSSGYLCGEFRDKVAHLEVARHAHEYI

SEQ ID NO: 74 - RNA, 20 nt, synthetic construct
  misc_feature 1..20: note = Space Sequence
  source 1..20: mol_type = other RNA
ggggccggggccggggccgg

SEQ ID NO: 75 - RNA, 20 nt, synthetic construct
  misc_feature 1..20: note = Space Sequence
  source 1..20: mol_type = other RNA
gggccggggccggggccggg

SEQ ID NO: 76 - RNA, 20 nt, synthetic construct
  misc_feature 1..20: note = Space Sequence
  source 1..20: mol_type = other RNA
ggccggggccggggccgggg

SEQ ID NO: 77 - RNA, 20 nt, synthetic construct
  misc_feature 1..20: note = Space Sequence
  source 1..20: mol_type = other RNA
gccggggccggggccggggc

SEQ ID NO: 78 - RNA, 20 nt, synthetic construct
  misc_feature 1..20: note = Space Sequence
  source 1..20: mol_type = other RNA
ccggggccggggccggggcc

SEQ ID NO: 79 - RNA, 20 nt, synthetic construct
  misc_feature 1..20: note = Space Sequence
  source 1..20: mol_type = other RNA
cggggccggggccggggccg

SEQ ID NO: 80-81 - skipped (2 entries)

SEQ ID NO: 82 - RNA, 93 nt, synthetic construct; identical to SEQ ID NO: 12
  misc_feature 1..93: note = Scaffold Sequence
  source 1..93: mol_type = other RNA

SEQ ID NO: 83 - RNA, 83 nt, synthetic construct; identical to SEQ ID NO: 13
  misc_feature 1..83: note = Scaffold Sequence
  source 1..83: mol_type = other RNA

SEQ ID NO: 84 - protein, 181 aa, unidentified
  REGION 1..181: note = CasRX/Cas13d Gut metagenome contig2643000492
NGEIVSLAEKEAFSAKIADKNIGCKIENKQFRHPKGYDVIADNPIYKGSPRQDMLGLKETLEKRYFSPSDSIDNVRVQVAHNILDIEKILAEYITNAVYSFDNIAGFGKDIIGDDFSPVYTYDKFEKSDRYEYFKNLLNNSRLGYYGQAFFECDDSKENKKKKDAIKCYNIIALLSGLRHW

SEQ ID NO: 85 - protein, 440 aa, unidentified
  REGION 1..440: note = CasRX/Cas13d Gut metagenome contig874000057
MSKNKESYAKGMGLKSALVSGSKVYMTSFEGGNDAKLEKVVENSEIVSLAEKESFSAEIFKKNIGCKIENKKFKHPKRYDVIADNPLYKGSVRQDMLGLKETLEKRYFNSADGTDNVCIQVIHNILDIEKILAEYITNAVYSFDNIAGFGEDIIGMGGFKPIYTYKQFKEPDKYNKKFDDILNNSRLGYYGKAFFEKNDLKHNPNKKKRDKNPYILKYDNECYYIIALLSGLRHWNIHSHAKDDLVSYRWLYNLDSILNREYISTLNYLYDDIADELTESFSKNSSANVNYIAETLNIDPSEFAQQYFRFSIMKEQKNMGFNVSKLREIMLDRKELSDIRDNHRVFDSIRSKLYTMMDFVIYRYYIEEAAKTEAENRNLPENEKKISEKDFFVINLRGSFDENQKEKLYIEEAKRLWEKLKDIMLKIKEFRGEKVKEYKK

SEQ ID NO: 86 - protein, 137 aa, unidentified
  REGION 1..137: note = CasRX/Cas13d Gut metagenome contig4781000489
LDKQLDYEYIRTLNYMFNDIADELTRTFSKNSAANVNYIAETLNIDPNKFAEQYFRFSIMKEQKNLGFNLTKLRESMLDRRELSDIRDNHNVFDSIRPKLYTMMDFVIYKHYIDEAKKTEAENKSLPDDRKNLSEKD

SEQ ID NO: 87 - protein, 87 aa, unidentified
  REGION 1..87: note = CasRX/Cas13d Gut metagenome contig12144000352
RMGEPVANTKRVMMIDAVKILGTDLSDDELKEMADSFFKDSDGNLLKKGKHGMRNFITNNVIKNKRFHYLIRYGDPAHLHEIAKNEA

SEQ ID NO: 88 - protein, 414 aa, unidentified
  REGION 1..414: note = CasRX/Cas13d Gut metagenome contig5590000448
VHNNEEKDLIKYTWLYNLDKYLDAEYITTLNYMYNDIGDELTDSFSKNSAANINYIAETLGIDPKTFAEQYFRFSIMKEQKNLGFNLTKLREVMLDRKDMSEIRENHNDFDSIRAKVYTMMDFVIYRYYIEEAAKVNAANKSLPDNEKSLSEKDIFVISLRGSFNEDQKDRLYYDEAQRLWSKVGKLMLKIKKFRGKDTRKYKNMGTPRIRRLIPEGRDISTFSKLMYALTMFLDGKEINDLLTTLINKFDNIQSFLKVMPLIGVNAKFAEEYSFFNNSEKIADELRLIKSFARMGEPVADARRAMYIDAIRILGTDLSDDELKALADSFSLDENGNKLGKGKHGMRNFIINNVITNKRFHYLIRYGNPVHLHEIAKNEAVVKFVLGRIADIQKKQGQNGKNQIDRYYETCIGK

SEQ ID NO: 89 - protein, 345 aa, unidentified
  REGION 1..345: note = CasRX/Cas13d Gut metagenome contig525000349
MSKKENRKSYVKGLGLKSTLVSDSKVYLTTFADGSNAKLEKCVENNKIICISNDKEAFAASIANKNVGYKIKNDEKFRHPKGYDIISNNPLLHNNSVQQDMLGLKNVLEKRYFGKSSGGDNNLCIQIIHNIIDIEKILSEYIPNVVYAFNNIAGFKDEHNNIIDIIGTQTYNSSYTYADFSKDKSDKKYIEFQKLLKNKRLGYWGKAFFTGQGNNAKVRQENQCFHIIALLISLRNWATHSNELDKHTKRTWLYKLDDTNILNAEYVKTLNYLYDTIADELTKSFSKNGAVNVNYLAKKYNIKDDLPGFSEQYFRFSIMKEQKNLGFNISKLRENMLDFKDMSVI

SEQ ID NO: 90 - protein, 206 aa, unidentified
  REGION 1..206: note = CasRX/Cas13d Gut metagenome contig7229000302
KKISSLTKFCLGESDEKKLKALAKKSLEELKTTNSKLYENYIKYSDERKAEEAKRQINRERAKTAMNAHLRNTKWNDIMYGQLKDLADSKSRICSEFRNKAAHLEVARYAHMYINDISEVKSYFRLYHYIMQRRIIDVIENNPKAKYEGKVKVYFEDVKKNKKYNKNLLKLMCVPFGYCIPRFKNLSIEQMFDMNETDNSDKKKEK

SEQ ID NO: 91 - protein, 95 aa, unidentified
  REGION 1..95: note = CasRX/Cas13d Gut metagenome contig3227000343
IGDISEVNSYFQLYHYIMQRILIDKIGSKTTGKAKEYFDSVIVNKKYDDRLLKLLCSPLGYCLTRYKDLSIEALFDMNEAAKYDKLNKERKNKKK

SEQ ID NO: 92 - protein, 115 aa, unidentified
  REGION 1..115: note = CasRX/Cas13d Gut metagenome contig7030000469
SIRSKLYTMMDFVIYRYYIEESAKAAAENKPSESDSFVIRLRGSFNENQKEELYIEEAERLWKKFGEIMLKIKEFRGEKVKEYKKEVPRIERILPHGKDISAFSKLMYMLSMFLD

SEQ ID NO: 93 - protein, 234 aa, unidentified
  REGION 1..234: note = CasRX/Cas13d gut metagenome P17E0k2120140920, c87000043
MYFSKMIYMLTYFLDGKEINDLLTTLISKFDNIKEFLKIMKSSAVDVECELTAGYKLFNDSQRITNELFIVKNIASMRKPAASAKLTMFRDALTILGIDDKITDDRISEILKLKEKGKGIHGLRNFITNNVIESSRFVYLIKYANAQKIREVAKNEKVVMFVLGGIPDTQIERYYKSCVEFPDMNSSLEAKRSELARMIKNISFDDFKNVKQQAKGRENVAKERAKAVIGLYLT

SEQ ID NO: 94 - protein, 939 aa, unidentified
  REGION 1..939: note = contig emb OBVH01003037.1, human gut metagenome sequence
MAKKKRITAKERKQNHRELLMKKADSNAEKEKAKKPVVENKPDTAISKDNTPKPNKEIKKSKAKLAGVKWVIKANDDVAYISSFGKGNNSVLEKRIMGDVSSNVNKDSHMYVNPKYTKKNYEIKNGFSSGSSLVTYPNKPDKNSGMDALCLKPYFEKDFFGHIFTDNMHIQAIYNIFDIEKILAKHITNIIYTVNSFDRNYNQSGNDTIGFGLNYRVPYSEYGGGKDSNGEPKNQSKWEKRDNFIKFYNESKPHLGYYENIFYDHGEPISEEKFYNYLNILNFIRNNTFHYKDDDIELYSENYSEEFVFINCLNKFVKNKFKNVNKNFISNEKNNLYIILNAYGKDTENVEVVKKYSKELYKLSVLKTNKNLGVNVKKLRESAIEYGYCPLPYDKEKEVAKLSSVKHKLYKTYDFVITHYLNSNDKLLLEIVETLRLSKNDDEKENVYKKYAEKLFKADDVINPIKAISKLFARKGNKLFKEKIIIKKEYIEDVSIDKNIYDFTKVIFFMTCFLDGKEINDLLTNIISKLQVIEDHNNVIKFISNNKDAVYKDYSDKYAIFRNAGKIATELEAIKSIARMENKIENAPQEPLLKDALLSLGVSDDTKVLENTYNKYFDSKEKTDKQSQKVSTFLMNNVINNNRFKYVIKYINPADINGLAKNRYLVKFVLSKIPEEQIDSYYKLFSNEEEPGCEEKIKLLTKKISKLNFQTLFENNKIPNVEKEKKKAIITLYFTIVYILVKNLVNINGLYTLALYFVERDGYFYKDICGKKDKKKSYNDVDYLLLPEIFSGSKYREETKNLKLPKEKDRDIMKKYLPNDKDREKYNKFFTAYRNNIVHLNIIAKLSELTKNIDKDINSYFDIYHYCTQRVMFNYCKEKNDVVLAKMKDLAHIKSDCNEFSSKHTYPFSSAVLRFMNLPFAYNVPRFKNLSYKKFFDKQ

SEQ ID NO: 95 - protein, 877 aa, unidentified; identical to SEQ ID NO: 50
  REGION 1..877: note = contig tpg DJXD01000002.1

SEQ ID NO: 96 - DNA, 36 bp, unidentified; identical to SEQ ID NO: 51
  misc_feature 1..36: note = CasRX/Cas13d DR
  source 1..36: mol_type = other DNA

SEQ ID NO: 97 - protein, 984 aa, unidentified
  REGION 1..984: note = contig OGZC01000639.1
MKKKNIRATREALKAQKIKKSQENEALKKQKLAEEAAQKRREELEKKNLAQWEETSAEGRRSRVKAVGVKSVFVVGDDLYLATFGNGNETVLEKKITPDGKITTFPEEETFTAKLKFAQTEPTVATSIGISNGRIVLPEISVDNPLHTTMQKNTIKRSAGEDILQLKDVLENRYFDRSFNDDLHIRLIYNILDIEKILAEYTTNAVFAIDNVSGCSDDFLSNFSTRNQWDEFQNPEQHREHFGNKDNVICSVKKQQDLFFNFFKNNRIGYFGKAFFHAESERKIVKKTEKEVYHILTLIGSLRQWITHSTEGGISRLWLYQLEDALSREYQETMNNCYNSTIYGLQKDFEKTNAPNLNFLAEILGKNASELAEPYFRFIITKEYKNLGFSIKTLREMLLDQPDLQEIRENHNVYDSIRSKLYKMIDFVLVYAYSNERKSKADALASNLRSAITEDAKKRIYQNEADQLWTSYQELFKRIRGFKGAQVKEYSSKNMPIPIQKQIQNILKPAEQVTYFTKLMYLLTMFLDGKEINDLLTTLINKFDNISSLLKTMEQLELQTTFKEDYTFFQQSSRLCKEITQLKSFARMGNPISNLKEVMMVDAIQILGTEKSEQELQSMACFFFRDKNGKKLNTGEHGMRNFIGNNVISNTRFQYLIRYGNPQKLHTLSQNETVVRFVLSRIAKNQRVQGMNGKNQIDRYYETCGGTNSWSVSEEEKINFLCKILTNMSYDQFQDVKQSGAEITAEEKRKKERYKAIISLYLTVLYQLIKNLVNINARYIIAFHCLERDAILYSSKFNTSINLKKRYTALTEMILGYETDEKARRKDTRTVYEKAEAAKNRHLKNVKWNCKTRENLENADKNAIVAFRNIVAHLWIIRDADRFITGMGAMKRYFDCYHYLLQRELGYILEKSNQGSEYTKKSLEKVQQYHSYCKDFLHMLCLPFAYCIPRYKNLSIAELFDRHEPEAEPKEEASSVNNSQFITT

SEQ ID NO: 98 - protein, 978 aa, unidentified
  REGION 1..978: note = contig emb OHBM01000764.1
  REGION 1..222: note = misc_feature - Xaa can be any naturally occurring amino acid
XXXXXXXXXXXXXXXXXXXXXXXXXXXXXXXXXXXXXXXXXXXXXXXXXXXXXXXXXXXXXXXXXXXXXXXXXXXXXXXXXXXXXXXXXXXXXXXXXXXXXXXXXXXXXXXXXXXXXXXXXXXXXXXXXXXXXXXXXXXXXXXXXXXXXXXXXXXXXXXXXXXXXXXXXXXXXXXXXXXXXXXXXXXXXXXXXXXXXXXXXXXXXXXXXXXXXXXXXXXXXXHPLQKRYRYLTSTNLKSFETYKNNLVNKKKFDLDRVKKIPQLAYFGSAFYNTPEDTSAKITKTKIKSNEEIYYTFMLLSTARNFSAHYLDRNRAKSSDAEDFDGTSVIMYNLDNEELYKKLYNKKVHMALTGMKKVLDANFNKKVEHLNNSFIKNSAKDFVILCEVLGIKSRDEKTKFVKDYYDFVVRKNYKHLGFSVKELRELLFANHDSNKYIKEFDKISNKKFDSVRSRLNRLADYIIYDYYNKNNAKVSDLVKYLRAAADDEQKKKIYLNESINLVKSGILERIKKILPKLNGKIIGNMQPDSTITASMLHNTGKDWHPISENAHYFTKWIYTLTLFMDGKEINDLVTTLINKFDNIASFIEVLKSQSVCTHFSEERKMFIDSAEICSELSAMNSFARMEAPGASSKRAMFVEAARILGDNRSKEELEEYFDTLFDKSASKKEKGFRNFIRNNVVDSNRFKYLTRYTDTSSVKAFSNNKALVKFAIKDIPQEQILRYYNSCFGASERYYNDGMSDKLVEAIGKINLMQFNGVIQQADRNMLPEEKKKANAQKEKYKSIIRLYLTVCYLFFKNLVYVNSRYYSAFYNLEKDRSLFEINGELKPTGKFDEGHYTGLVKLFIDNGWINPRASAYLTVNLANSDETAIRTFRNTAEHLEALRNADKYLNDLKQFDSYFEIYHYITQRNIKEKCEMLKEQTVKYNNDLLKYHGYSKDFVKALCVPFGYNLPRFKNLSIDALFDKNDKREKLKKGFED

SEQ ID NO: 99 - protein, 1023 aa, unidentified
  REGION 1..1023: note = contig emb OHCP01000044.1
MAKKITAKQKREEKERLNKQKWAKNDSVIIVPETKEEIKTGEIQDNNRKRSRQKSQAKAMGLKAVLSFDNKIAIASFVSSKNAKSSHIERITDKEGTTISVNSKMFESSVNKRDINIEKRITIEEPQQDGTIKKEEKGVKSTTCNPYFKVGGKDYIGIKEIAEEHFFGRAFPNENLRVQIAYNIFDVQKILGTFVNNIIYSFYNLSRDEVQSDNDVIGMLYSISDYDRQKETETFLQAKSLLKQTEAYYAYFDDVFKKNKKPDKNKEGDNSKQYQENLRHNFNILRVLSFLRQICMHAEVHVSDDEGCTRTQNYTDSLEALFNISKAFGKKMPELKTLIDNIYSKGINAINDEFVKNGKNNLYILSKVYPNEKREVLLREYYNFVVCKEGSNIGISTRKLKETMIAQNMPSLKEENTYRNKLYTVMNFILVRELKNCATIREQMIKELRANMDEEEGRDRIYSKYAKEIYLYVKDKLKLMLNVFKEEAEGIIIPGKEDPVKFSHGKLDKKEIESFCLTTKNTEDITKVIYFLCKFLDGKEINELCCAMMNKLDGISDLIETAKQCGEDVEFVDQFKCLSKCATMSNQIRIVKNISRMKKEMTIDNDTIFLDALELLGRKIEKYQKDKNGDYVKDEKGKKVYTKDYNNFQDMFFEGKNHRVRNFVSNNVIKSKWFSYVVRYNKPAECQALMRNSKLVKFALDELPDSQIEKYYISVFGEKSSSSNEEMRRELLKKLCDFSVRGFLDEIVLLSEDEMKQKDKFSEKEKKKSLIRLYLTIVYLITKSMVKINTRFSIACATYERDYILLCQSEKAERAWEKGATAFALTRKFLNHDKPTFEQYYTREREISAMPQEKRKELRKENDQLLKKTHYSKHAYCYIVDNVNNLTGAVANDNGRGLPCLSEKNDNANLFLEMRNKIVHLNVVHDMVKYINEIKNITSYYAFFCYVLQRMIIGNNSNEQNKFKAKYSKTLQEFGTYSKDLMWVLNLPFAYNLPRYKNLSNEQLFYDEEERMEKIVGRKNDSR

SEQ ID NO: 100 - protein, 926 aa, unidentified
  REGION 1..926: note = contig emb OGDF01008514.1
MTETKPKREDIAKTPAAKSRSKAAGLKSTFAVNGSVLLTSFGRGNDAVPEKLITEKAVSEINTVKPRFSVEKPATSYSSSFGIKSHISATADNPLAGRAPVGEDAIHAKEVLEQRVFGKTFSDDNIHIQLIYNILDIRKILSTYANNVVFTINSMRRLDEYDREQDYLGYLYTGNSYERLLDIADKYAVDGEDWRNTAAGISNDFEKKQFQTINGFWDLLDMIEPYMCYFSEAFFCETTVKDPDSGRIVPCLEQRSDGDIYNILRILSIVRQTCMHDNASMRTVMFTLGQNSVRDRKNGFDELAELLDYLYDEKIDIVNRDFLRNQKNNIELLSRIYGSSADSPERDRLVQNFYDFRVLSQDKNLGFSIKKLREKLLDSPALSVVRSKKYDTMRSKIYSLIDFMIYRKFSENHVAVDDFVEELRSLLTEDEKESAYSRWAETLINDGFAQEILVKLLPQTDPAVIGKIKGKKLLNDSIAGIKLKKDASFFTKIINVLCMFQDGKEINELVSSLVNKFANIQSFVDVMRSQGIDSGFTADYAMFAESGRISRELHILKGIARMQHSIAGLGDVKIYGSDDKFHGVSRRVYTDAAYILGFGERSEDNDGYVDDYVSSKLLGGADKNLRNFITNNVIKNRRFLYTVRYMNPKRAKKLVQNDALVVLALSGIPETQIDRYYKSCIEKRSFNPDLNEKIAALSEMITTLKIDDFEDVKQNPEKNANYEAKKNQRISKERYKACIGLYLTVLYLICKNLVKINARYSIAIGCLERDTQLHGVDFKGAAYMTRDVFIAKGWINPKKPTVKSIKEQYAFLTPYIFTTYRNMIAHLAAVTNAYKYIPQMDRFKSWFHLYHTVIQHSLIQQYEYDRDYGRKGAPVVSERVLQLLEQCREHSNYSRDLLHILNLPFGYNLPRYLNLSSEKYFDANAI

SEQ ID NO: 101 - protein, 1030 aa, unidentified
  REGION 1..1030: note = contig emb OGPN01002610.1
MAKKITAKQKREEKERLNKQKWAKQDTPVVPKSKTEEKPVAASDDKLLKTTQVKKVQTKSKAKAMGLKTVLSFDDKIAIASFVNDKKTKLPHIERITDKSGTTIHENARMFDSSVDEQNVNIEKRMTIEEKQNDGTFKKDEKDVKATICNPYFKTCGKDYIGIKDVAEKYFFGKTFPNENLRVQIAYNVFDIQKILGTYVNNIIYSFYNLRRDGKSDVDIIGSLYAFADFDNQLKDKPAFREAKDLLKNTEAYFSYFGDVFKKSKKGKKDENNEDYEKNLRHNFNVLRVLSFLRQICTHAYVKCTGGAKNNGDSTKVEAESLDALFNITEYFAKTAPELSKTINEIYKEGIDRINNDFVTNGKNNLYILSKVYPDMQRNELVKKYYQFVVCKEGNNVGINTRKLKESIISQHPWITTPQDNNKANDYESCRHKLYTIMCFILVAELDAHESIRDNMVAELRANMDGDDGRDAIYEKYAKDIYHIVKDKLLAMQKVFDEELVPVKVEGKNDPQQFTHGKLGKKEIESFCLSDKNTSDIAKVVYFLCNFLDGKEINELCCAMMNKFDGIGDLIDTAKQCGEEVKFIEEFACLSNCRKITNDIRVAKSISKMKNKVNIDNDIIYLDAIELLGRKIEKYQKDENGKILLGTDGKRLYTQEYKYFNDMFFNAGNHKVRNFIANNVMQSKWFFYVVRYNKPAECQIIMRNKTLVKFTLDDLPDMQIQRYYSSVFGDNNMPAVDEMRKRLLDKINQFSVRGFLDELDEIVLMSDEESKRNKSSEKEQKKSLIRLYLTIAYLITKSMVKINTRFSIACAMYERDYALLCQSEMKGGPWDGGAQALAVTRKFLNHDREVFDRYCAREAEIARLPSEERKPLRKANDKLLKQTHYTNHSYTYIVNNLNSFTDIDYCAKDVGLPAPNDKNDNASILGEMRNDIAHLNIVHDMVKYIEELKDISSYYAFYCYVLQRRLVGKDPNCQNKFKAKYAKELNDYGTYNKNLMWMLNLPFAYNLPRYKNLSSEFLFYDMEYNKKDDE

SEQ ID NO: 102 - protein, 1027 aa, unidentified
  REGION 1..1027: note = contig emb OBLI01020244
MAKKITAKQRREERERQNKQKWAKKQADATAVFECEADIKPADSKDEDCTNIYIKREKKKTQAKAMGLKTVLGFDNKIAIASFMSSKDSKSSHIERITDPNGKTIREDVRMFDSNVDECSINLEKRMTVEERQKDGTIKKDEKDVKSTICNPYSNECGKDYIGIKSVAEELFFGRTFPNDNLRVQIAYNIFDIQKILGTYINNIIYSFYNLSRDESQSDNDVIGTLYMLKDFDGQKETDTFRQARALLERTEAYYSYFDNVFKKIDKNKKKSDDCKRERNEILRYNFNVLRVLSFLRQICAHAQVKISNEHDREKGGGLVDSLDALFNISRFFDAVAPELNEVINSVYSKGIDDINDNFVKNGKNNFYILSKIYPEVAREDLLREYYYFVVSKEGNNIGISTKKLKEAIIVQDMSYIKSEDYDTYRNKLYTVLCFILVKELNERTTIREQMVADLRANMNGDIGREDIYSKYAKIIYAQVKPRFDTMKSAFEEEAKDVIVPDKKKPVKFSHGKLDKNEIERFCITSANTDSVAKIIYFLCKFLDGKEINELCCAMMNKLDGINDLIETAEQCGAKVEFVDKFSVLSNCETISDQIRIVKSISKMKKEIAIDNDTIFLDALELLGRKIDKYKKDATGKYLKDENGKYLYSKEYDDFQYMFFKDSHRVRNFISNSVIKSKWFSYIVRYNQPSECRAIMKNKTLVKFALDELPDLQIQRYFVALYGDEDLPSYGEMRKILLKKLHDFSIKGFLDEIVLLSDLDMESQDKYCEKEQKKSLFRLYLTIAYLITKSMVKINTRFSIACATYERDYALLCASNKQERAWSSGATALALTRRFLNQDKLIFEKHYAREGEISKLPKEERKAMRKVNDQLLKRTHFSKHSYCYIVDNVNRLTGGECRTDKRVLPVLNEKNDNAGILLDFRKTIAHLNVVHKMVDYVDEIKGITSYYAFFCYVLQRMLVGNNLNEKNAIKEKYSATVKSFGTYSKDFMWLINLPFAYNLPRYKNLSNEQLFYDEEERNETEEQIDRL

SEQ ID NO: 103 - protein, 961 aa, unidentified
  REGION 1..961: note = contig OIZX01000427.1
MAKKKKTARQLREEMQQQRKQAIQKQQEQRQEKAAAARETAAPEQPAAAPVPKRQRKSLAKAAGLKSNFILDPQRRTTVMTAFGQGSTAILEKQIVDRAISDLQPVQQFQVEPASAAKYRLKNSRVRFPNVTADDPLYRRKDGGFVPGMDALRRKNVLEQRFFGKSFADNIHIQMIYSILDIHKILAAASGHIVHLLNIVNGSKDRDFIGMLAAHVLYNELNEEAKRSIADFCKSPRLIYYSAAFYETLDNGKSERRSNEDIFNILALMTCLRNFSSHHSIAIKVKDYSAAGLYNLRRLGPDMKKMLDTFYTEAFIQLNQSFQDHNTTNLTCLFDILNISDSARQKQLAEEFYRYVVFKEQKNLGFSVRKLREEMLLLPDAAVIADKRYDTCRSKLYNLMDFLILRVYRTGRADRCDKLPEALRAALTDEEKAVVYHKEALSLWNEMRTLILDGLLPQMTPENLSRLSGQKRKGELSLDDAMLKECLYEPGPVPEDAAPEEANAEYFCRMIYLATLFMDGKEINTLLTTLISKFENIAAFLQTMEQLNIEAELGPEYAMFTRSRAVAEQLRVINSFALMKKPQVNAKQQLYRAAVTLLGTEDPDGVTDEMLCIDPVTGKMLPPNQRHHGDTGLRNFIANNVVESRRFQYLIRYSDPAQLHQLASNKKLVRFVLSSIPDTQINRYYETCGQTRLAGRAAKVEFLTDMIAAIRFDQFRDVNQKERGANTQKERYKAMLGLYQTVLYLAVKNLVNINARYVMAFHCVERDMFLYDGELTDPKGESVSAFLAVNGKKGVQPQYLLLTQLFIRRDYLKRSACEQIQHNMENISDRLLREYRNAVAHLNVIAHLADYSADMREITSYYGLYHYLMQRHLFKRHAWQIRQPERPTEEEQKLIEQEQKQLAWEKALFDKTLQYHSYNKDLVKALNAPFGYNLARYKNLSIEPLFSKEAAPAAEIKATHA

SEQ ID NO: 104 - protein, 911 aa, unidentified
  REGION 1..911: note = contig OCTW011587266.1
MKQNDRENNNKIKKSAAKAVGVKSLARLSDGSTVVSSFGKGAAAELESLITGGEIRKLSDKAILEITDDTQNKNAYNVKSSRIPNLTARTDKLSDKSGMDDLGFKRELELEVFGQCFDDSIHIQIAHAVFDIQKSLAAVIPNVLYTLNNLDRSYSTDNTSDKKDIIGNTLNYQHSYESFNVEKRGEFTEYYNAAKDRFSYFPDILCVLEKVNGKDRYQPKSEKDAFNVLSSVNMLRNSLFHFAPKSNDGKARIAVFKNQFDSDFSHITSTVNKIYSAKIAGVNENFLNNEGNNLYIILKATNWDIKKIVPQLYRFSVLKSDKNMGFNMRKLREFAVESKNIDLSRLNDKFLTNNRKKLYKVIDFIIYYHLNKVLKDSFVDDFVAALRASQSEEEKEKLYAQYSERLFADEGLKSAIKKAVDMISDTKSNIFKMKTPLDKALIENIKVNSDASDFCKLIYVFTRFLDGKEINILLNSLIKKFQDIHSFNTTVKKLSENNLIINADYVDDYSLFEQSGTVARELMLIKSISKMDFGLDNINLSFMYDDALRTLGVSDENLPEVKREYFGKTKNLSAYIRNNVLENRRFKYVIKYIHPSDVQKIACNKAIAGFVLNRMPDTQIKRYYDSLINKGATDIQAQAKALLDCITGISFDAIKDDKHLHKSKEKSPQRSADRERKKAMLTLYYTIVYIFVKQMLHINSLYTIGFFYLERDQRFIYSRAKKENKNPSKNSYLNDFRSVTAYFIPSEIMKRIEKNENKGFLEDFEALWNSCGKTSRLRKEDVLLYARYISPDHALKNYKMILNSYRNKIAHINVIMSAGKYTGGIKRMDSYFSVFQHLVQCDILSNPNNKGKCFESESLKPLLLDMKFDGTDEKLYSKRLTRALNIPFGYNVPRYKNLTFEKIYLKSSINE

SEQ ID NO: 105 - protein, 904 aa, unidentified
  REGION 1..904: note = contig emb OGNF01009141.1
MADIDKKKSSAKAAGLKSTFVLENNKLLMTSFGNGNKAVIEKIIDEKVDSINEPEVFSVTPCDKKFELQPAKRGLAADSLVDNPLKSKKTAGDDAIHSRKFLERQFFDGNTFNDNIHIQLIYNILDIEKILSVHVNDIVYSVNNILSRGEGMEYNDYIGTLNLKSFETYKNNLVNKKKFDLDRVKKIPQLAYFGSAFYNTPEDTSAKITKTKIKSNEEIYYTFMLLSTARNFSAHYLDRNRAKSSDAEDFDGTSVIMYNLDNEELYKKLYNKKVHMALTGMKKVLDANFNKKVEHLNNSFIKNSAKDFVILCEVLGIKSRDEKTKFVKDYYDFVVRKNYKHLGFSVKELRELLFANHDSNKYIKEFDKISNKKFDSVRSRLNRLADYIIYDYYNKNNAKVSDLVKYLRAAADDEQKKKIYLNESINLVKSGILERIKKILPKLNGKIIGNMQPDSTITASMLHNTGKDWHPISENAHYFTKWIYTLTLFMDGKEINDLVTTLINKFDNIASFIEVLKSQSVCTHFSEERKMFIDSAEICSELSAMNSFARMEAPGASSKRAMFVEAARILGDNRSKEELEEYFDTLFDKSASKKEKGFRNFIRNNVVDSNRFKYLTRYTDTSSVKAFSNNKALVKFAIKDIPQEQILRYYNSCFGASERYYNDGMSDKLVEAIGKINLMQFNGVIQQADRNMLPEEKKKANAQKEKYKSIIRLYLTVCYLFFKNLVYVNSRYYSAFYNLEKDRSLFEINGELKPTGKFDEGHYTGLVKLFIDNGWINPRASAYLTVNLANSDETAIRTFRNTAEHLEALRNADKYLNDLKQFDSYFEIYHYITQRNIKEKCEMLKEQTVKYNNDLLKYHGYSKDFVKALCVPFGYNLPRFKNLSIDALFDKNDKREKLKKGFED

SEQ ID NO: 106 - protein, 933 aa, unidentified
  REGION 1..933: note = contig emb OIEN01002196.1
MERQKRKMKSKSKMAGVKSVFVIGDELLMTSFGDGDDAVLEKDIDENGVVNDCRNPAAYDAVYGTDSIRVKKTNNNIRAKVNNPLAKSNIRSEESALFRTRVNEYKREQKDKYETLFFGKTFDDNIHIQLISKILDIEKTFSVVIGNIVYAINNLSLEQSIDRPIDIFGDKNTQGISLREDNDYLKTMLPRCEYLFHNILNSDSDNNSKMNYNKVNKGKEEKDNRNNENIEKLKKALEVIKIIRVDSFHGVDGIKGDQKFPRSKYNLAVNYNEEIQKTISEPFNRKVEEVQQDFYRNSCVNIDFLKEIMYGSNYTDRGSDSLECSYFNFAILKQNKNMGFSITSIRECLLDLYELNFESMQNLRPRANSFCDFLIYDYYCKNESERANLVDCLRSAASEEEKKNIYFQTAERVKEKFRNAFNRISRFDASYIKNSREKNLSGGSSLPKYSFIEGFTKRSKKINDNDEKNADLFCNMLYYLAQFLDGKEINIFLTSIHNIFQNIDSFLKVMKEKGMECKFQKDFKMFSHAGHVAKKIEIVISLAKMKKTLDFYNAQALKDAVTILGVSKKHQYLDMNSYLDFYMFDNRSGATGKNAGKDHNLRNFLVSNVIRSRKFNYLSRYSNLAEVKKLAQNPSLVQFVLSRIEPSLICRYYESSQGISSEGITIDEQIKKLTGIIVDMNIDSFENINNGEIGMRYSKATPQSIERRNQMRVCVGLYLNVLYQIEKNLMNVNARYVLAFAFAERDALMLNFTLEECKKNKKRSSGGFSFIEMTQFFIDKKLFKVATEAIKKNVLKYNGNPESLNHIPGEYICKNMEGYHENTVRNFRNMVAHLTAVARVPLYISEVTQIDSYYALYHYCMQMNILQGIEQSGKILDNIKLKNALENARVHRTYSKDAVKYLCLPFAYNISRYKALTIKDLFDWTEYSCKKDE

SEQ ID NO: 107 - protein, 1034 aa, unidentified; identical to SEQ ID NO: 46
  REGION 1..1034: note = contig e-k87 11092736

SEQ ID NO: 108 - DNA, 30 bp, unidentified; identical to SEQ ID NO: 47
  misc_feature 1..30: note = CasRX/Cas13d Direct repeat 1
  source 1..30: mol_type = other DNA

SEQ ID NO: 109 - protein, 973 aa, unidentified
  REGION 1..973: note = CasRX/Cas13d Ga0129306 1000735
MQKQREQQTVTDESERKKKPLKSGAKAAGLKSVFVLSEGKELLTSFGRGNEAVPEKRVTGGTIANARTDNKEAFSAALQNKRFEVFGRTAGSSDDPLAVSRAPGQDLIGAKTALEERYFGRAFADNIHMQVIYAIQDINKILAVHANNIVYTLNNLDREADPETDDFIGSGYLTLKNTFETYCDPAALNEREREKVTVSKQHFDAFMQNPRLAYYGNAFFRKLSKAERLARGREIFDKESPERRQEILGSRGKNKSVDDEIRALAPEWVKREERDVYSELVLMSELRQSCFHGQQKNSARIFRLDNDLGPGVDGARELLDRLYAEKINDLRSFDKTSASSNFRLLFNAYHADNEKKKELAQEFYRFSVLKVSKNTGFSIRTLREKIIEDHAAQYRDKIYDSMRKKLFSTFDFFLWRFYEEREDEAEELRACLRAARSDEEKEQIYAEAAASCWPSVKPFVESVAATLCDVVKGRTKLNKLKLSADESTLVRNAIDGVRISPRASYFTKLIYLMTLFLDGKEINDLLTTLIHAFENIDSFLSVLGSERLERTFDANYRIFADSGVIAQELRAVNSFARMTTEPFNSKLVMFEDAAQLFGMSGGLVEHAEELREYLDNKMLDKTKLRLLPDGKVDTGFRNFIISNVTESRRFRYLVRYCEPRAVRDYMSCRPLIRLTLRDMPDTILRRYYEQSVGAATVDRERILDTLADKLLSLRFTDFENVNQRANAERNREKQKMMGIISLYLNVAYQIVKNLVYVNARYTMAYHCAERDTELLLNAAGEGNLLRRDRSWPARLHLPRRALARRRDRVEVMERDVARGPEAYNRDEWLGLVRTLRREKRVCDNLHNNYAYLCGADAEPGDASLSLLFVYRNKAAHLSVLNKGGRLSGDLKEAKSWFYVYHFLMQRVLEEEFRNTQALPERLRELLMMAERYRGCSKDLIKVLNLTFAYNLPRYKNLSIDGRFDKNHPDPSDE

SEQ ID NO: 110 - protein, 854 aa, unidentified
  REGION 1..854: note = CasRX/Cas13d Ga0129317 1008067
MKKQKKSLVKAAGLKSAFVVGDSVYLTSFGKGNAARLDTKINPDNSTERYVSDSEKHTLKINSITDTELRLSGPFPKQAEAKNPTHKKDNEQKNTRQDMLGLKSTLEKFYFGSTFDDNIHIQIIHNIQDIAKILAAHSNNAGYALDNMLAYQGVEFSDMIGYMGTSRTFDNYDPNHKNNKDFFRFLKLPRLGYFGSAFYSQKGKDFEKRSDEEVYNICALMGQIRQCCFHGKQEKYQLKWLYNFHNFKSNKPFLDTLDKHFDEMIDRINKNFIKNNTPDLIILSGLYPDMAKKELVRLFYDFTTVKEYKNMGFSVKKLREKMLESEEASDFRDKDYDSVRRKLYKLMDFCIYYLYYSDSERNENLVSRLRESLTDENKDIIYSKEAKIVWNELRKKFSTILDNVKGSNIKKLENVKEKFISEDEFDDIKLDIDISYFSKLMYVMCYFLDGKEINDLLTTLVSKFDNIGSIIEAATQIGINIEFIDDFKFFDRSKDISVELNIIRNFARMQAPVPNAKRAMQEDAIRILGGSEEDIFSILDDMTGYDKSGKKLAQSKKGFRNFIINNVVESSRFKYIVRYSNPQKIRKLANNSVVVGFVLGKLPDAQIESYFNSCLPNRVYSTPDKARESLRDMLHNISFNDFADVKQDDRRATPEEKVEKERYKAIIGLYLTVMYHLVKNLVYVNSRYVMAFHCLERDAMHYDVSLDNYRDLIRHLISEGDSSCNHFISHNRRMRDCIEENVKNSEQLIFGKEDAVIRFRNNVAHLSAIRNANEYIGDIREITSYFALYHYLMQRKLIDDCKVNDTAHKYFEQLTKYKTYVMDMVKALCSPFGYNLPRFKNLSIEGKFDMHESK

SEQ ID NO: 111 - protein, 965 aa, unidentified
  REGION 1..965: note = CasRX/Cas13d Ga0224415 10048792
MSKKENRKSYVKGLGLKSTLVSDSKVYLTTFADGSNAKLEKCVENNKIICISNDKEAFAASIANKNVGYKIKNDEKFRHPKGYDIISNNPLLHNNSVQQDMLGLKNVLEKRYFGKSSGGDNNLCIQIIHNIIDIEKILSEYIPNVVYAFNNIAGFKDEHNNIIDIIGTQTYNSSYTYADFSKDKSDKKYIEFQKLLKNKRLGYWGKAFFTGQGNNAKVRQENQCFHIIALLISLRNWATHSNELDKHTKRTWLYKLDDTNILNAEYVKTLNYLYDTIADELTKSFSKNGAVNVNYLAKKYNIKDDLPGFSEQYFRFSIMKEQKNLGFNISKLRENMLDFKDMSVIRDDHNRYDKDRSKIYTMMDFVIYRYYIDNNNDSIDFINKLRSSIDEKSKEKLYNEEANRLWNKLKEYMLYIKEFNGKLASRTPDRDGNISEFVESLPKIHRLLPRGQKISNFSKLMYLLTMFLDGKEINDLLTTLINKFENIQGFLDIMPEINVNAKFEPEYVFFNKSHEIAGELKLIKGFAQMGEPAATLKLEMTADAIKILGTEKEDAELIKLAESLFKDENGKLLGNKQHGMRNFIGNNVIKSKRFHYLIRYGDPAHLHKIATNKNVVRFVLGRIADMQKKQGQKGKNQIDRYYEVCVGNKDIKKTIEEKIDALTDIIVNMNYDQFEKKKAVIENQNRGKTFEEKNKYKRDNAEREKFKKIISLYLTVIYHILKNIVNVNSRYILGFHCLERDKQLYIEKYNKDKLDGFVALTKFCLGDEERFEDLKAKAQASIQALETANPKLYAKYMNYSDEEKKEEFKKQLNRERVKNARNAYLKNIKNYIMIRLQLRDQTDSSGYLCGEFRDKVAHLEVARHAHEYIGNIKEVNSYFQLYHYIMQCRLYDVLKNNTKAEAMVKGKAKEYFEALEKEGTYNDKLLKIACVPFGYCIPRYKNLSMEELFDMNEEKKFKKKAPENT

SEQ ID NO: 112 - protein, 1022 aa, unidentified; identical to SEQ ID NO: 48
  REGION 1..1022: note = CasRX/Cas13d 160582958 gene49834

SEQ ID NO: 113 - protein, 36 aa, unidentified
  REGION 1..36: note = CasRX/Cas13d DR
GAACTACACCCCTCTGTTCTTGTAGGGGTCTAACAC

SEQ ID NO: 114 - protein, 998 aa, unidentified
  REGION 1..998: note = CasRX/Cas13d 250twins 35838 GL0110300
MGNKQRVSAQKRRENAKLCNQQKARQAESQRDKIKNMNVEKMKNINTNDIKHTKTTAKKLGLKSTIIADKKIILTSFINEQSSKTANIEKVAGFKGDTIDTISYTPRMFRSEINPGEIVISKGDDLSEFANPANFPIGRDYVKIRSALEKQYFGKEFPEDNLHVQIAYNVADIKKILSVYINNIIYMFYNLARSEEYDIFYNSQSENSGRDCDVIGSLYYQASYRNQDANRFEKDGKKKAIDSLLDDTRAYYTYFDGLFSVPKREDDGKIKESEKEKAKDQNFDVLRLLSVGRQLTFHSDKSNNEAYLFDLSKLTRAAQDENRRQDIQSLLNILNSTCRSNLEGVNGDFVKHAKNNLYVLNQLYPSLKANDLIGEYYNFIVKKENRNIGIRLITVRELIIEHNYTNLKDSKYDTYRNKIYTVLNFILFREIQENSIAIKNFREKLRSTEKAEQPALYQAFANKIYPMVQAKFAKAIDLFEEQYKTKFKSEFKGGISIENMQQQNILLQTENIDYFSKYVLFLTKFLDGKEINELLCALINKFDNIADLLDISKQIGTPVVFCADYESLNDAAKIAENIRLIKNIAHLRPAIQEAQSSKDNADAAGTPATLLIDAYNMLNTDIQLVYGEAAYEELRKDLFERKNGTKYNKKGKKVDVYDHKFRNFLINNVIKSKWFFYIAKYVKPADCAKMMSNKKMIEFALRDLPETQIKRYYYTITGNEALGDAESLKGVIIEQLHAFSIKNTLLSIKNMGEGEYKIQQIGSSKEKLKAIVNLYLTVAYLLTKSLVKVNIRFSIAFGCLERDLVLQKKSEKKFDAIINEILLEDDKIRKECDKERAQAKTLPRELAQERFAQIKRRESGCYFKSYHVYDYLSKNSNEFKQNHIDFAVTSYRNNVEHLNVVHCMTKYFSEVKDVKSYYGVYCYIMQRMLCDELIIKNQDKPDVRQTFEEYNRLLKDHGTYSKNLMWLLNFPFAYNLARYKNLSNEDLFNAKNNDQKSK

SEQ ID NO: 115 - protein, 1020 aa, unidentified
  REGION 1..1020: note = CasRX/Cas13d 250twins 36050 GL0158985
MKKKHQSAAEKRQVKKLKNQEKAQKYASEPSPLQSDTAGVECSQKKTVVSHIASSKTLAKAMGLKSTLVMGDKLVITSFAASKAVGGAGYKSANIEKITDLQGRVIEEHERMFSADVGEKNIELSKNDCHTNVNNPVVTNIGKDYIGLKSRLEQEFFGKTFENDNLHVQLAYNILDIKKILGTYVNNIIYIFYNLNRAGTGRDERMYDDLIGTLYAYKPMEAQQTYLLKGDKDMRRFEEVKQLLQNTSAYYVYYGTLFEKVKAKSKKEQRAKEAEIDACTAHNYDVLRLLSLMRQLCMHSVAGTAFKLAESALFNIEDVLSADLKEILDEAFSGAVNKLNDGFVQHSGNNLYVLQQLYPNETIERIAEKYYRLTVRKEDLNMGVNIKKLRELIVGQYFPEVLDKEYDLSKNGDSVVTYRSKIYTVMNYILLYYLEDHDSSRESMVEALRQNREGDEGKEEIYRQFAKKVWNGVSGLFGVCLNLFKTEKRNKFRSKVALPDVSGAAYMLSSENIDYFVKMLFFVCKFLDGKEINELLCALINKFDNIADILDAAAQCGSSVWFVDSYRFFERSRRISAQIRIVKNIASKDFKKSKKDSDESYPEQLYLDALALLGDVISKYKQNRDGSVVIDDQGNAVLTEQYKRFRYEFFEEIKRDESGGIKYKKSGKPEYNHQRRNFILNNVLKSKWFFYVVKYNRPSSCRELMKNKEILRFVLRDIPDSQVRRYFKAVQGEEAYASAEAMRTRLVDALSQFSVTACLDEVGGMTDKEFASQRAVDSKEKLRAIIRLYLTVAYLITKSMVKVNTRFSIAFSVLERDYYLLIDGKKKSSDYTGEDMLALTRKFVGEDAGLYREWKEKNAEAKDKYFDKAERKKVLRQNDKMIRKMHFTPHSLNYVQKNLESVQSNGLAAVIKEYRNAVAHLNIINRLDEYIGSARADSYYSLYCYCLQMYLSKNFSVGYLINVQKQLEEHHTYMKDLMWLLNIPFAYNLARYKNLSNEKLFYDEEAAAEKADKAENERGE

SEQ ID NO: 116 - protein, 128 aa, synthetic construct
  REGION 1..128: note = RNase1(K41R)
KESRAKKFQRQHMDSDSSPSSSSTYCNQMMRRRNMTQGRCRPVNTFVHEPLVDVQNVCFQEKVTCKNGQGNCYKSNSSMHITDCRLTNGSRYPNCAYRTSPKERHIIVACEGSPYVPVHFDASVEDST

SEQ ID NO: 117 - protein, 128 aa, synthetic construct
  REGION 1..128: note = RNase1 (RNase1(K41R, D121E))
KESRAKKFQRQHMDSDSSPSSSSTYCNQMMRRRNMTQGRCRPVNTFVHEPLVDVQNVCFQEKVTCKNGQGNCYKSNSSMHITDCRLTNGSRYPNCAYRTSPKERHIIVACEGSPYVPVHFEASVEDST

SEQ ID NO: 118 - protein, 128 aa, synthetic construct
  REGION 1..128: note = RNase1 (RNase1(K41R, D121E, H119N))
KESRAKKFQRQHMDSDSSPSSSSTYCNQMMRRRNMTQGRCRPVNTFVHEPLVDVQNVCFQEKVTCKNGQGNCYKSNSSMHITDCRLTNGSRYPNCAYRTSPKERHIIVACEGSPYVPVNFEASVEDST

SEQ ID NO: 119 - protein, 128 aa, synthetic construct
  REGION 1..128: note = (RNase1(H119N))
KESRAKKFQRQHMDSDSSPSSSSTYCNQMMRRRNMTQGRCKPVNTFVHEPLVDVQNVCFQEKVTCKNGQGNCYKSNSSMHITDCRLTNGSRYPNCAYRTSPKERHIIVACEGSPYVPVNFDASVEDST

SEQ ID NO: 120 - protein, 128 aa, synthetic construct
  REGION 1..128: note = (RNase1(R39D, N67D, N88A, G89D, R91D, H119N))
KESRAKKFQRQHMDSDSSPSSSSTYCNQMMRRRNMTQGDCKPVNTFVHEPLVDVQNVCFQEKVTCKDGQGNCYKSNSSMHITDCRLTADSDYPNCAYRTSPKERHIIVACEGSPYVPVNFDASVEDST

SEQ ID NO: 121 - protein, 128 aa, synthetic construct
  REGION 1..128: note = RNase1 (RNase1(R39D, N67D, N88A, G89D, R91D, H119N, K41R, D121E))
KESRAKKFQRQHMDSDSSPSSSSTYCNQMMRRRNMTQGDCRPVNTFVHEPLVDVQNVCFQEKVTCKDGQGNCYKSNSSMHITDCRLTADSDYPNCAYRTSPKERHIIVACEGSPYVPVNFEASVEDST

SEQ ID NO: 122 - protein, 128 aa, synthetic construct
  REGION 1..128: note = RNase1 (RNase1(R39D, N67D, N88A, G89D, R91D))
KESRAKKFQRQHMDSDSSPSSSSTYCNQMMRRRNMTQGDCKPVNTFVHEPLVDVQNVCFQEKVTCKDGQGNCYKSNSSMHITDCRLTADSDYPNCAYRTSPKERHIIVACEGSPYVPVHFDASVEDST

SEQ ID NO: 123 - protein, 311 aa, unidentified
  REGION 1..311: note = Endonuclease III-like protein 1 (NTHL)
CSPQESGMTALSARMLTRSRSLGPGAGPRGCREEPGPLRRREAAAEARKSHSPVKRPRKAQRLRVAYEGSDSEKGEGAEPLKVPVWEPQDWQQQLVNIRAMRNKKDAPVDHLGTEHCYDSSAPPKVRRYQVLLSLMLSSQTKDQVTAGAMQRLRARGLTVDSILQTDDATLGKLIYPVGFWRSKVKYIKQTSAILQQHYGGDIPASVAELVALPGVGPKMAHLAMAVAWGTVSGIAVDTHVHRIANRLRWTKKATKSPEETRAALEEWLPRELWHEINGLLVGFGQQTCLPVHPRCHACLNQALCPAAQGL

SEQ ID NO: 124 - protein, 372 aa, Homo sapiens
MESGQPARRIAMAPLLEYERQLVLELLDTDGLVVCARGLGADRLLYHFLQLHCHPACLVLVLNTQPAEEEYFINQLKIEGVEHLPRRVTNEITSNSRYEVYTQGGVIFATSRILVVDFLTDRIPSDLITGILVYRAHRIIESCQEAFILRLFRQKNKRGFIKAFTDNAVAFDTGFCHVERVMRNLFVRKLYLWPRFHVAVNSFLEQHKPEVVEIHVSMTPTMLAIQTAILDILNACLKELKCHNPSLEVEDLSLENAIGKPFDKTIRHYLDPLWHQLGAKTKSLVQDLKILRTLLQYLSQYDCVTFLNLLESLRATEKAFGQNSGWLFLDSSTSMFINARARVYHLPDAKMSKKEKISEKMEIKEGEGILWG

SEQ ID NO: 125 - protein, 287 aa, Homo sapiens
PKRGKKGAVAEDGDELRTEPEAKKSKTAAKKNDKEAAGEGPALYEDPPDQKTSPSGKPATLKICSWNVDGLRAWIKKKGLDWVKEEAPDILCLQETKCSENKLPAELQELPGLSHQYWSAPSDKEGYSGVGLLSRQCPLKVSYGIGDEEHDQEGRVIVAEFDSFVLVTAYVPNAGRGLVRLEYRQRWDEAFRKFLKGLASRKPLVLCGDLNVAHEEIDLRNPKGNKKNAGFTPQERQGFGELLQAVPLADSFRHLYPNTPYAYTFWTYMMNARSKNVGWRLDYFLLS

SEQ ID NO: 126 - protein, 213 aa, Homo sapiens
EALFFPSQVTCTEALLRAPGAELAELPEGCPCGLPHGESALSRLLRALLAARASLDLCLFAFSSPQLGRAVQLLHQRGVRVRVVTDCDYMALNGSQIGLLRKAGIQVRHDQDPGYMHHKFAIVDKRVLITGSLNWTTQAIQNNRENVLITEDDEYVRLFLEEFERIWEQFNPTKYTFFPPKKSHGSCAPPVSRAGGRLLSWHRTCGTSSESQT

SEQ ID NO: 127 - protein, 382 aa, Homo sapiens
KARYKTLEPRGYSLLIRGLIHSDRWREALLLLEDIKKVITPSKKNYNDCIQGALLHQDVNTAWNLYQELLGHDIVPMLETLKAFFDFGKDIKDDNYSNKLLDILSYLRNNQLYPGESFAHSIKTWFESVPGKQWKGQFTTVRKSGQCSGCGKTIESIQLSPEEYECLKGKIMRDVIDGGDQYRKTTPQELKRFENFIKSRPPFDVVIDGLNVAKMFPKVRESQLLLNVVSQLAKRNLRLLVLGRKHMLRRSSQWSRDEMEEVQKQASCFFADDISEDDPFLLYATLHSGNHCRFITRDLMRDHKACLPDAKTQRLFFKWQQGHQLAIVNRFPGSKLTFQRILSYDTVVQTTGDSWHIPYDEDLVERCSCEVPTKWLCLHQKT

SEQ ID NO: 128 - protein, 360 aa, Homo sapiens
SVEPMFRHLKNTYAGLQLVVVILPGKTPVYAEVKRVGDTVLGMATQCVQMKNVQRTTPQTLSNLCLKINVKLGGVNNILLPQGRPPVFQQPVIFLGADVTHPPAGDGKKPSIAAVVGSMDAHPNRYCATVRVQQHRQEIIQDLAAMVRELLIQFYKSTRFKPTRIIFYRDGVSEGQFQQVLHHELLAIREACIKLEKDYQPGITFIVVQKRHHTRLFCTDKNERVGKSGNIPAGTTVDTKITHPTEFDFYLCSHAGIQGTSRPSHYHVLWDDNRFSSDELQILTYQLCHTYVRCTRSVSIPAPAYYAHLVAFRARYHLVDKEHDSAEGSHTSGQSNGRDHQALAKAVQVHQDTLRTMYFA

SEQ ID NO: 129 - protein, 327 aa, Homo sapiens
QGAEGALTGKQPDGSAEKAVLEQFGFPLTGTEARCYTNHALSYDQAKRVPRWVLEHISKSKIMGDADRKHCKFKPDPNIPPTFSAFNEDYVGSGWSRGHMAPAGNNKFSSKAMAETFYLSNIVPQDFDNNSGYWNRIEMYCRELTERFEDVWVVSGPLTLPQTRGDGKKIVSYQVIGEDNVAVPSHLYKVILARRSSVSTEPLALGAFVVPNEAIGFQPQLTEFQVSLQDLEKLSGLVFFPHLDRTSDIRNICSVDTCKLLDFQEFTLYLSTRKIEGARSVLRLEKIMENLKNAEIEPDDYFMSRYEKKLEELKAKEQSGTQIRKPS

SEQ ID NO: 130 - protein, 526 aa, Homo sapiens
EHPSKMEFFQKLGYDREDVLRVLGKLGEGALVNDVLQELIRTGSRPGALEHPAAPRLVPRGSCGVPDSAQRGPGTALEEDFRTLASSLRPIVIDGSNVAMSHGNKETFSCRGIKLAVDWFRDRGHTYIKVFVPSWRKDPPRADTPIREQHVLAELERQAVLVYTPSRKVHGKRLVCYDDRYIVKVAYEQDGVIVSNDNYRDLQSENPEWKWFIEQRLLMFSFVNDRFMPPDDPLGRHGPSLSNFLSRKPKPPEPSWQHCPYGKKCTYGIKCKFYHPERPHHAQLAVADELRAKTGARPGAGAEEQRPPRAPGGSAGARAAPREPFAHSLPPARGSPDLAALRGSFSRLAFSDDLGPLGPPLPVPACSLTPRLGGPDWVSAGGRVPGPLSLPSPESQFSPGDLPPPPGLQLQPRGEHRPRDLHGDLLSPRRPPDDPWARPPRSDRFPGRSVWAEPAWGDGATGGLSVYATEDDEGDARARARIALYSVFPRDQVDRVMAAFPELSDLARLILLVQRCQSAGAPLGKP

SEQ ID NO: 131 - protein, 475 aa, Homo sapiens
RQQQPQVVEKQQETPLAPADFAHISQDAQSLHSGASRRSQKRLQSPSKQAQPLDDPEAEQLTVVGKISFNPKDVLGRGAGGTFVFRGQFEGRAVAVKRLLRECFGLVRREVQLLQESDRHPNVLRYFCTERGPQFHYIALELCRASLQEYVENPDLDRGGLEPEVVLQQLMSGLAHLHSLHIVHRDLKPGNILITGPDSQGLGRVVLSDFGLCKKLPAGRCSFSLHSGIPGTEGWMAPELLQLLPPDSPTSAVDIFSAGCVFYYVLSGGSHPFGDSLYRQANILTGAPCLAHLEEEVHDKVVARDLVGAMLSPLPQPRPSAPQVLAHPFFWSRAKQLQFFQDVSDWLEKESEQEPLVRALEAGGCAVVRDNWHEHISMPLQTDLRKFRSYKGTSVRDLLRAVRNKKHHYRELPVEVRQALGQVPDGFVQYFTNRFPRLLLHTHRAMRSCASESLFLPYYPPDSEARRPCPGATGR

SEQ ID NO: 132 - protein, 384 aa, Homo sapiens
KLVRKNIEKDNAGQVTLVPEEPEDMWHTYNLVQVGDSLRASTIRKVQTESSTGSVGSNRVRTTLTLCVEAIDFDSQACQLRVKGTNIQENEYVKMGAYHTIELEPNRQFTLAKKQWDSVVLERIEQACDPAWSADVAAVVMQEGLAHICLVTPSMTLTRAKVEVNIPRKRKGNCSQHDRALERFYEQVVQAIQRHIHFDVVKCILVASPGFVREQFCDYLFQQAVKTDNKLLLENRSKFLQVHASSGHKYSLKEALCDPTVASRLSDTKAAGEVKALDDFYKMLQHEPDRAFYGLKQVEKANEAMAIDTLLISDELFRHQDVATRSRYVRLVDSVKENAGTVRIFSSLHVSGEQLSQLTGVAAILRFPVPELSDQEGDSSSEED

SEQ ID NO: 133 - protein, 166 aa, Homo sapiens
SLVIRNLQRVIPIRRAPLRSKIEIVRRILGVQKFDLGIICVDNKNIQHINRIYRDRNVPTDVLSFPFHEHLKAGEFPQPDFPDDYNLGDIFLGVEYIFHQCKENEDYNDVLTVTATHGLCHLLGFTHGTEAEWQQMFQKEKAVLDELGRRTGTRLQPLTRGLFGGS

SEQ ID NO: 134 - protein, 178 aa, Homo sapiens
QEVIAGLERFTFAFEKDVEMQKGTGLLPFQGMDKSASAVCNFFTKGLCEKGKLCPFRHDRGEKMVVCKHWLRGLCKKGDHCKFLHQYDLTRMPECYFYSKFGDCSNKECSFLHVKPAFKSQDCPWYDQGFCKDGPLCKYRHVPRIMCLNYLVGFCPEGPKCQFAQKIREFKLLPGSKI

SEQ ID NO: 135 - protein, 384 aa, Homo sapiens
KLVRKNIEKDNAGQVTLVPEEPEDMWHTYNLVQVGDSLRASTIRKVQTESSTGSVGSNRVRTTLTLCVEAIDFDSQACQLRVKGTNIQENEYVKMGAYHTIELEPNRQFTLAKKQWDSVVLERIEQACDPAWSADVAAVVMQEGLAHICLVTPSMTLTRAKVEVNIPRKRKGNCSQHDRALERFYEQVVQAIQRHIHFDVVKCILVASPGFVREQFCDYMFQQAVKTDNKLLLENRSKFLQVHASSGHKYSLKEALCDPTVASRLSDTKAAGEVKALDDFYKMLQHEPDRAFYGLKQVEKANEAMAIDTLLISDELFRHQDVATRSRYVRLVDSVKENAGTVRIFSSLHVSGEQLSQLTGVAAILRFPVPELSDQEGDSSSEED

SEQ ID NO: 136 - protein, 256 aa, Homo sapiens
DPAWSADVAAVVMQEGLAHICLVTPSMTLTRAKVEVNIPRKRKGNCSQHDRALERFYEQVVQAIQRHIHFDVVKCILVASPGFVREQFCDYMFQQAVKTDNKLLLENRSKFLQVHASSGHKYSLKEALCDPTVASRLSDTKAAGEVKALDDFYKMLQHEPDRAFYGLKQVEKANEAMAIDTLLISDELFRHQDVATRSRYVRLVDSVKENAGTVRIFSSLHVSGEQLSQLTGVAAILRFPVPELSDQEGDSSSEED

SEQ ID NO: 137 - protein, 209 aa, Homo sapiens
MDPGKDKEGVPQPSGPPARKKFVIPLDEDEVPPGVRGNPVLKFVRNVPWEFGDVIPDYVLGQSTCALFLSLRYHNLHPDYIHGRLQSLGKNFALRVLLVQVDVKDPQQALKELAKMCILADCTLILAWSPEEAGRYLETYKAYEQKPADLLMEKLEQDFVSRVTECLTTVKSVNKTDSQTLLTTFGSLEQLIAASREDLALCPGLGPQK

SEQ ID NO: 138 - protein, 128 aa, Homo sapiens
KESRAKKFQRQHMDSDSSPSSSSTYCNQMMRRRNMTQGRCKPVNTFVHEPLVDVQNVCFQEKVTCKNGQGNCYKSNSSMHITDCRLTNGSRYPNCAYRTSPKERHIIVACEGSPYVPVHFDASVEDST

SEQ ID NO: 139 - protein, 123 aa, Homo sapiens [sequence omitted]

SEQ ID NO: 140 - protein, 129 aa, Homo sapiens
GLGLVQPSYGQDGMYQRFLRQHVHPEETGGSDRYCNLMMQRRKMTLYHCKRFNTFIHEDIWNIRSICSTTNIQCKNGKMNCHEGVVKVTDCRDTGSSRAPNCRYRAIASTRRVVIACEGNPQVPVHFDG

SEQ ID NO: 141 - protein, 375 aa, Homo sapiens
  SITE 1: note = misc_feature - Xaa can be any naturally occurring amino acid
XSAVDNILLKLAKFKIGFLRLGQIQKVHPAIQQFTEQEICRSKSIKSLALLEELYNSQLIVATTCMGINHPIFSRKIFDFCIVDEASQISQPICLGPLFFSRRFVLVGDHQQLPPLVLNREARALGMSESLFKRLEQNKSAVVQLTVQYRMNSKIMSLSNKLTYEGKLECGSDKVANAVINLRHFKDVKLELEFYADYSDNPWLMGVFEPNNPVCFLNTDKVPAPEQVEKGGVSNVTEAKLIVFLTSIFVKAGCSPSDIGIIAPYRQQLKIINDLLARSIGMVEVNTVDKYQGRDKSIVLVSFVRSNKDGTVGELLKDWRRLNVAITRAKHKLILLGCVPSLNCYPPLEKLLNHLNSEKLISFFFCIWSHLIALL

SEQ ID NO: 142 - protein, 88 aa, Homo sapiens
MALRSHDRSTRPLYISVGHRMSLEAAVRLTCCCCRFRIPEPVRQADICSREHIRKSLGLPGPPTPRSPKAQRPVACPKGDSGESSALC

SEQ ID NO: 143 - protein, 212 aa, Homo sapiens
CYTNHALSYDQAKRVPRWVLEHISKSKIMGDADRKHCKFKPDPNIPPTFSAFNEDYVGSGWSRGHMAPAGNNKFSSKAMAETFYLSNIVPQDFDNNSGYWNRIEMYCRELTERFEDVWVVSGPLTLPQTRGDGKKIVSYQVIGEDNVAVPSHLYKVILARRSSVSTEPLALGAFVVPNEAIGFQPQLTEFQVSLQDLEKLSGLVFFPHLDRT

SEQ ID NO: 144 - protein, 123 aa, Homo sapiens
VTVSQMTSVLNGKTRRFADIQLQHGALCFNIRYGTTVEEEKNHVLEIARQRAVAQAWTKEQRRLQEGEEGIRAWTEGEKQQLLSTGRVQGYDGYFVLSVEQYLELSDSANNIHFMRQSEIGRR

SEQ ID NO: 145 - protein, 125 aa, Homo sapiens
TVSQPTLLVNGKTRRFTNIEFQYSTLLLSIRYGLTPDTLDEEKARVLDQARQRALGTAWAKEQQKARDGREGSRLWTEGEKQQLLSTGRVQGYEGYYVLPVEQYPELADSSSNIQFLRQNEMGKR

SEQ ID NO: 146 - skipped

SEQ ID NO: 147 - protein, 1368 aa, Streptococcus pyogenes [sequence omitted]

SEQ ID NO: 148 - protein, 1368 aa, Streptococcus pyogenes
MDKKYSIGLAIGTNSVGWAVITDEYKVPSKKFKVLGNTDRHSIKKNLIGALLFDSGETAEATRLKRTARRRYTRRKNRICYLQEIFSNEMAKVDDSFFHRLEESFLVEEDKKHERHPIFGNIVDEVAYHEKYPTIYHLRKKLVDSTDKADLRLIYLALAHMIKFRGHFLIEGDLNPDNSDVDKLFIQLVQTYNQLFEENPINASGVDAKAILSARLSKSRRLENLIAQLPGEKKNGLFGNLIALSLGLTPNFKSNFDLAEDAKLQLSKDTYDDDLDNLLAQIGDQYADLFLAAKNLSDAILLSDILRVNTEITKAPLSASMIKRYDEHHQDLTLLKALVRQQLPEKYKEIFFDQSKNGYAGYIDGGASQEEFYKFIKPILEKMDGTEELLVKLNREDLLRKQRTFDNGSIPHQIHLGELHAILRRQEDFYPFLKDNREKIEKILTFRIPYYVGPLARGNSRFAWMTRKSEETITPWNFEEVVDKGASAQSFIERMTNFDKNLPNEKVLPKHSLLYEYFTVYNELTKVKYVTEGMRKPAFLSGEQKKAIVDLLFKTNRKVTVKQLKEDYFKKIECFDSVEISGVEDRFNASLGTYHDLLKIIKDKDFLDNEENEDILEDIVLTLTLFEDREMIEERLKTYAHLFDDKVMKQLKRRRYTGWGRLSRKLINGIRDKQSGKTILDFLKSDGFANRNFMQLIHDDSLTFKEDIQKAQVSGQGDSLHEHIANLAGSPAIKKGILQTVKVVDELVKVMGRHKPENIVIEMARENQTTQKGQKNSRERMKRIEEGIKELGSQILKEHPVENTQLQNEKLYLYYLQNGRDMYVDQELDINRLSDYDVDAIVPQSFLKDDSIDNKVLTRSDKNRGKSDNVPSEEVVKKMKNYWRQLLNAKLITQRKFDNLTKAERGGLSELDKAGFIKRQLVETRQITKHVAQILDSRMNTKYDENDKLIREVKVITLKSKLVSDFRKDFQFYKVREINNYHHAHDAYLNAVVGTALIKKYPKLESEFVYGDYKVYDVRKMIAKSEQEIGKATAKYFFYSNIMNFFKTEITLANGEIRKRPLIETNGETGEIVWDKGRDFATVRKVLSMPQVNIVKKTEVQTGGFSKESILPKRNSDKLIARKKDWDPKKYGGFDSPTVAYSVLVVAKVEKGKSKKLKSVKELLGITIMERSSFEKNPIDFLEAKGYKEVKKDLIIKLPKYSLFELENGRKRMLASAGELQKGNELALPSKYVNFLYLASHYEKLKGSPEDNEQKQLFVEQHKHYLDEIIEQISEFSKRVILADANLDKVLSAYNKHRDKPIREQAENIIHLFTLTNLGAPAAFKYFDTTIDRKRYTSTKEVLDATLIHQSITGLYETRIDLSQLGGD

SEQ ID NO: 149 - protein, 1368 aa, Streptococcus pyogenes [sequence omitted]

SEQ ID NO: 150 - protein, 1053 aa, Staphylococcus aureus
MKRNYILGLDIGITSVGYGIIDYETRDVIDAGVRLFKEANVENNEGRRSKRGARRLKRRRRHRIQRVKKLLFDYNLLTDHSELSGINPYEARVKGLSQKLSEEEFSAALLHLAKRRGVHNVNEVEEDTGNELSTKEQISRNSKALEEKYVAELQLERLKKDGEVRGSINRFKTSDYVKEAKQLLKVQKAYHQLDQSFIDTYIDLLETRRTYYEGPGEGSPFGWKDIKEWYEMLMGHCTYFPEELRSVKYAYNADLYNALNDLNNLVITRDENEKLEYYEKFQIIENVFKQKKKPTLKQIAKEILVNEEDIKGYRVTSTGKPEFTNLKVYHDIKDITARKEIIENAELLDQIAKILTIYQSSEDIQEELTNLNSELTQEEIEQISNLKGYTGTHNLSLKAINLILDELWHTNDNQIAIFNRLKLVPKKVDLSQQKEIPTTLVDDFILSPVVKRSFIQSIKVINAIIKKYGLPNDIIIELAREKNSKDAQKMINEMQKRNRQTNERIEEIIRTTGKENAKYLIEKIKLHDMQEGKCLYSLEAIPLEDLLNNPFNYEVDHIIPRSVSFDNSFNNKVLVKQEENSKKGNRTPFQYLSSSDSKISYETFKKHILNLAKGKGRISKTKKEYLLEERDINRFSVQKDFINRNLVDTRYATRGLMNLLRSYFRVNNLDVKVKSINGGFTSFLRRKWKFKKERNKGYKHHAEDALIIANADFIFKEWKKLDKAKKVMENQMFEEKQAESMPEIETEQEYKEIFITPHQIKHIKDFKDYKYSHRVDKKPNRELINDTLYSTRKDDKGNTLIVNNLNGLYDKDNDKLKKLINKSPEKLLMYHHDPQTYQKLKLIMEQYGDEKNPLYKYYEETGNYLTKYSKKDNGPVIKKIKYYGNKLNAHLDITDDYPNSRNKVVKLSLKPYRFDVYLDNGVYKFVTVKNLDVIKKENYYEVNSKCYEEAKKLKKISNQAEFIASFYNNDLIKINGELYRVIGVNNDLLNRIEVNMIDITYREYLENMNDKRPPRIIKTIASKTQSIKKYSTDILGNLYEVKSKKHPQIIKKG

SEQ ID NO: 151 - protein, 1121 aa, Streptococcus thermophilus
MSDLVLGLDIGIGSVGVGILNKVTGEIIHKNSRIFPAAQAENNLVRRTNRQGRRLARRKKHRRVRLNRLFEESGLITDFTKISINLNPYQLRVKGLTDELSNEELFIALKNMVKHRGISYLDDASDDGNSSVGDYAQIVKENSKQLETKTPGQIQLERYQTYGQLRGDFTVEKDGKKHRLINVFPTSAYRSEALRILQTQQEFNPQITDEFINRYLEILTGKRKYYHGPGNEKSRTDYGRYRTSGETLDNIFGILIGKCTFYPDEFRAAKASYTAQEFNLLNDLNNLTVPTETKKLSKEQKNQIINYVKNEKAMGPAKLFKYIAKLLSCDVADIKGYRIDKSGKAEIHTFEAYRKMKTLETLDIEQMDRETLDKLAYVLTLNTEREGIQEALEHEFADGSFSQKQVDELVQFRKANSSIFGKGWHNFSVKLMMELIPELYETSEEQMTILTRLGKQKTTSSSNKTKYIDEKLLTEEIYNPVVAKSVRQAIKIVNAAIKEYGDFDNIVIEMARETNEDDEKKAIQKIQKANKDEKDAAMLKAANQYNGKAELPHSVFHGHKQLATKIRLWHQQGERCLYTGKTISIHDLINNSNQFEVDHILPLSITFDDSLANKVLVYATANQEKGQRTPYQALDSMDDAWSFRELKAFVRESKTLSNKKKEYLLTEEDISKFDVRKKFIERNLVDTRYASRVVLNALQEHFRAHKIDTKVSVVRGQFTSQLRRHWGIEKTRDTYHHHAVDALIIAASSQLNLWKKQKNTLVSYSEDQLLDIETGELISDDEYKESVFKAPYQHFVDTLKSKEFEDSILFSYQVDSKFNRKISDATIYATRQAKVGKDKADETYVLGKIKDIYTQDGYDAFMKIYKKDKSKFLMYRHDPQTFEKVIEPILENYPNKQINDKGKEVPCNPFLKYKEEHGYIRKYSKKGNGPEIKSLKYYDSKLGNHIDITPKDSNNKVVLQSVSPWRADVYFNKTTGKYEILGLKYADLQFDKGTGTYKISQEKYNDIKKKEGVDSDSEFKFTLYKNDLLLVKDTETKEQQLFRFLSRTMPKQKHYVELKPYDKQKFEGGEALIKVLGNVANSGQCKKGLGKSNISIYKVRTDVLGNQHIIKNEGDKPKLDF

SEQ ID NO: 152 - protein, 1082 aa, Neisseria meningitidis
MAAFKPNPINYILGLDIGIASVGWAMVEIDEDENPICLIDLGVRVFERAEVPKTGDSLAMARRLARSVRRLTRRRAHRLLRARRLLKREGVLQAADFDENGLIKSLPNTPWQLRAAALDRKLTPLEWSAVLLHLIKHRGYLSQRKNEGETADKELGALLKGVADNAHALQTGDFRTPAELALNKFEKESGHIRNQRGDYSHTFSRKDLQAELILLFEKQKEFGNPHVSGGLKEGIETLLMTQRPALSGDAVQKMLGHCTFEPAEPKAAKNTYTAERFIWLTKLNNLRILEQGSERPLTDTERATLMDEPYRKSKLTYAQARKLLGLEDTAFFKGLRYGKDNAEASTLMEMKAYHAISRALEKEGLKDKKSPLNLSPELQDEIGTAFSLFKTDEDITGRLKDRIQPEILEALLKHISFDKFVQISLKALRRIVPLMEQGKRYDEACAEIYGDHYGKKNTEEKIYLPPIPADEIRNPVVLRALSQARKVINGVVRRYGSPARIHIETAREVGKSFKDRKEIEKRQEENRKDREKAAAKFREYFPNFVGEPKSKDILKLRLYEQQHGKCLYSGKEINLGRLNEKGYVEIDHALPFSRTWDDSFNNKVLVLGSENQNKGNQTPYEYFNGKDNSREWQEFKARVETSRFPRSKKQRILLQKFDEDGFKERNLNDTRYVNRFLCQFVADRMRLTGKGKKRVFASNGQITNLLRGFWGLRKVRAENDRHHALDAVVVACSTVAMQQKITRFVRYKEMNAFDGKTIDKETGEVLHQKTHFPQPWEFFAQEVMIRVFGKPDGKPEFEEADTPEKLRTLLAEKLSSRPEAVHEYVTPLFVSRAPNRKMSGQGHMETVKSAKRLDEGVSVLRVPLTQLKLKDLEKMVNREREPKLYEALKARLEAHKDDPAKAFAEPFYKYDKAGNRTQQVKAVRVEQVQKTGVWVRNHNGIADNATMVRVDVFEKGDKYYLVPIYSWQVAKGILPDRAVVQGKDEEDWQLIDDSFNFKFSLHPNDLVEVITKKARMFGYFASCHRGTGNINIRIHDLDHKIGKNGILEGIGVKTALSFQKYQIDELGKEIRPCRLKKRPPVR

SEQ ID NO: 153 - protein, 1037 aa, Parvibaculum lavamentivorans
MERIFGFDIGTTSIGFSVIDYSSTQSAGNIQRLGVRIFPEARDPDGTPLNQQRRQKRMMRRQLRRRRIRRKALNETLHEAGFLPAYGSADWPVVMADEPYELRRRGLEEGLSAYEFGRAIYHLAQHRHFKGRELEESDTPDPDVDDEKEAANERAATLKALKNEQTTLGAWLARRPPSDRKRGIHAHRNVVAEEFERLWEVQSKFHPALKSEEMRARISDTIFAQRPVFWRKNTLGECRFMPGEPLCPKGSWLSQQRRMLEKLNNLAIAGGNARPLDAEERDAILSKLQQQASMSWPGVRSALKALYKQRGEPGAEKSLKFNLELGGESKLLGNALEAKLADMFGPDWPAHPRKQEIRHAVHERLWAADYGETPDKKRVIILSEKDRKAHREAAANSFVADFGITGEQAAQLQALKLPTGWEPYSIPALNLFLAELEKGERFGALVNGPDWEGWRRTNFPHRNQPTGEILDKLPSPASKEERERISQLRNPTVVRTQNELRKVVNNLIGLYGKPDRIRIEVGRDVGKSKREREEIQSGIRRNEKQRKKATEDLIKNGIANPSRDDVEKWILWKEGQERCPYTGDQIGFNALFREGRYEVEHIWPRSRSFDNSPRNKTLCRKDVNIEKGNRMPFEAFGHDEDRWSAIQIRLQGMVSAKGGTGMSPGKVKRFLAKTMPEDFAARQLNDTRYAAKQILAQLKRLWPDMGPEAPVKVEAVTGQVTAQLRKLWTLNNILADDGEKTRADHRHHAIDALTVACTHPGMTNKLSRYWQLRDDPRAEKPALTPPWDTIRADAEKAVSEIVVSHRVRKKVSGPLHKETTYGDTGTDIKTKSGTYRQFVTRKKIESLSKGELDEIRDPRIKEIVAAHVAGRGGDPKKAFPPYPCVSPGGPEIRKVRLTSKQQLNLMAQTGNGYADLGSNHHIAIYRLPDGKADFEIVSLFDASRRLAQRNPIVQRTRADGASFVMSLAAGEAIMIPEGSKKGIWIVQGVWASGQVVLERDTDADHSTTTRPMPNPILKDDAKKVSIDPIGRVRPSND

SEQ ID NO: 154 - protein, 1084 aa, Corynebacterium diphtheriae
MKYHVGIDVGTFSVGLAAIEVDDAGMPIKTLSLVSHIHDSGLDPDEIKSAVTRLASSGIARRTRRLYRRKRRRLQQLDKFIQRQGWPVIELEDYSDPLYPWKVRAELAASYIADEKERGEKLSVALRHIARHRGWRNPYAKVSSLYLPDGPSDAFKAIREEIKRASGQPVPETATVGQMVTLCELGTLKLRGEGGVLSARLQQSDYAREIQEICRMQEIGQELYRKIIDVVFAAESPKGSASSRVGKDPLQPGKNRALKASDAFQRYRIAALIGNLRVRVDGEKRILSVEEKNLVFDHLVNLTPKKEPEWVTIAEILGIDRGQLIGTATMTDDGERAGARPPTHDTNRSIVNSRIAPLVDWWKTASALEQHAMVKALSNAEVDDFDSPEGAKVQAFFADLDDDVHAKLDSLHLPVGRAAYSEDTLVRLTRRMLSDGVDLYTARLQEFGIEPSWTPPTPRIGEPVGNPAVDRVLKTVSRWLESATKTWGAPERVIIEHVREGFVTEKRAREMDGDMRRRAARNAKLFQEMQEKLNVQGKPSRADLWRYQSVQRQNCQCAYCGSPITFSNSEMDHIVPRAGQGSTNTRENLVAVCHRCNQSKGNTPFAIWAKNTSIEGVSVKEAVERTRHWVTDTGMRSTDFKKFTKAVVERFQRATMDEEIDARSMESVAWMANELRSRVAQHFASHGTTVRVYRGSLTAEARRASGISGKLKFFDGVGKSRLDRRHHAIDAAVIAFTSDYVAETLAVRSNLKQSQAHRQEAPQWREFTGKDAEHRAAWRVWCQKMEKLSALLTEDLRDDRVVVMSNVRLRLGNGSAHKETIGKLSKVKLSSQLSVSDIDKASSEALWCALTREPGFDPKEGLPANPERHIRVNGTHVYAGDNIGLFPVSAGSIALRGGYAELGSSFHHARVYKITSGKKPAFAMLRVYTIDLLPYRNQDLFSVELKPQTMSMRQAEKKLRDALATGNAEYLGWLVVDDELVVDTSKIATDQVKAVEAELGTIRRWRVDGFFSPSKLRLRPLQMSKEGIKKESAPELSKIIDRPGWLPAVNKLFSDGNVTVVRRDSLGRVRLESTAHLPVTWKVQ

SEQ ID NO: 155 - protein, 1130 aa, Streptococcus sp.
  source 1..1130: note = Streptococcus pasteurianus
MTNGKILGLDIGIASVGVGIIEAKTGKVVHANSRLFSAANAENNAERRGFRGSRRLNRRKKHRVKRVRDLFEKYGIVTDFRNLNLNPYELRVKGLTEQLKNEELFAALRTISKRRGISYLDDAEDDSTGSTDYAKSIDENRRLLKNKTPGQIQLERLEKYGQLRGNFTVYDENGEAHRLINVFSTSDYEKEARKILETQADYNKKITAEFIDDYVEILTQKRKYYHGPGNEKSRTDYGRFRTDGTTLENIFGILIGKCNFYPDEYRASKASYTAQEYNFLNDLNNLKVSTETGKLSTEQKESLVEFAKNTATLGPAKLLKEIAKILDCKVDEIKGYREDDKGKPDLHTFEPYRKLKFNLESINIDDLSREVIDKLADILTLNTEREGIEDAIKRNLPNQFTEEQISEIIKVRKSQSTAFNKGWHSFSAKLMNELIPELYATSDEQMTILTRLEKFKVNKKSSKNTKTIDEKEVTDEIYNPVVAKSVRQTIKIINAAVKKYGDFDKIVIEMPRDKNADDEKKFIDKRNKENKKEKDDALKRAAYLYNSSDKLPDEVFHGNKQLETKIRLWYQQGERCLYSGKPISIQELVHNSNNFEIDHILPLSLSFDDSLANKVLVYAWTNQEKGQKTPYQVIDSMDAAWSFREMKDYVLKQKGLGKKKRDYLLTTENIDKIEVKKKFIERNLVDTRYASRVVLNSLQSALRELGKDTKVSVVRGQFTSQLRRKWKIDKSRETYHHHAVDALIIAASSQLKLWEKQDNPMFVDYGKNQVVDKQTGEILSVSDDEYKELVFQPPYQGFVNTISSKGFEDEILFSYQVDSKYNRKVSDATIYSTRKAKIGKDKKEETYVLGKIKDIYSQNGFDTFIKKYNKDKTQFLMYQKDSLTWENVIEVILRDYPTTKKSEDGKNDVKCNPFEEYRRENGLICKYSKKGKGTPIKSLKYYDKKLGNCIDITPEESRNKVILQSINPWRADVYFNPETLKYELMGLKYSDLSFEKGTGNYHISQEKYDAIKEKEGIGKKSEFKFTLYRNDLILIKDIASGEQEIYRFLSRTMPNVNHYVELKPYDKEKFDNVQELVEALGEADKVGRCIKGLNKPNISIYKVRTDVLGNKYFVKKKGDKPKLDFKNNKK

SEQ ID NO: 156 - protein, 1082 aa, Neisseria cinerea
MAAFKPNPMNYILGLDIGIASVGWAIVEIDEEENPIRLIDLGVRVFERAEVPKTGDSLAAARRLARSVRRLTRRRAHRLLRARRLLKREGVLQAADFDENGLIKSLPNTPWQLRAAALDRKLTPLEWSAVLLHLIKHRGYLSQRKNEGETADKELGALLKGVADNTHALQTGDFRTPAELALNKFEKESGHIRNQRGDYSHTFNRKDLQAELNLLFEKQKEFGNPHVSDGLKEGIETLLMTQRPALSGDAVQKMLGHCTFEPTEPKAAKNTYTAERFVWLTKLNNLRILEQGSERPLTDTERATLMDEPYRKSKLTYAQARKLLDLDDTAFFKGLRYGKDNAEASTLMEMKAYHAISRALEKEGLKDKKSPLNLSPELQDEIGTAFSLFKTDEDITGRLKDRVQPEILEALLKHISFDKFVQISLKALRRIVPLMEQGNRYDEACTEIYGDHYGKKNTEEKIYLPPIPADEIRNPVVLRALSQARKVINGVVRRYGSPARIHIETAREVGKSFKDRKEIEKRQEENRKDREKSAAKFREYFPNFVGEPKSKDILKLRLYEQQHGKCLYSGKEINLGRLNEKGYVEIDHALPFSRTWDDSFNNKVLALGSENQNKGNQTPYEYFNGKDNSREWQEFKARVETSRFPRSKKQRILLQKFDEDGFKERNLNDTRYINRFLCQFVADHMLLTGKGKRRVFASNGQITNLLRGFWGLRKVRAENDRHHALDAVVVACSTIAMQQKITRFVRYKEMNAFDGKTIDKETGEVLHQKAHFPQPWEFFAQEVMIRVFGKPDGKPEFEEADTPEKLRTLLAEKLSSRPEAVHKYVTPLFISRAPNRKMSGQGHMETVKSAKRLDEGISVLRVPLTQLKLKDLEKMVNREREPKLYEALKARLEAHKDDPAKAFAEPFYKYDKAGNRTQQVKAVRVEQVQKTGVWVHNHNGIADNATIVRVDVFEKGGKYYLVPIYSWQVAKGILPDRAVVQGKDEEDWTVMDDSFEFKFVLYANDLIKLTAKKNEFLGYFVSLNRATGAIDIRTHDTDSTKGKNGIFQSVGVKTALSFQKYQIDELGKEIRPCRLKKRPPVR

SEQ ID NO: 157 - protein, 1003 aa, Campylobacter lari
MRILGFDIGINSIGWAFVENDELKDCGVRIFTKAENPKNKESLALPRRNARSSRRRLKRRKARLIAIKRILAKELKLNYKDYVAADGELPKAYEGSLASVYELRYKALTQNLETKDLARVILHIAKHRGYMNKNEKKSNDAKKGKILSALKNNALKLENYQSVGEYFYKEFFQKYKKNTKNFIKIRNTKDNYNNCVLSSDLEKELKLILEKQKEFGYNYSEDFINEILKVAFFQRPLKDFSHLVGACTFFEEEKRACKNSYSAWEFVALTKIINEIKSLEKISGEIVPTQTINEVLNLILDKGSITYKKFRSCINLHESISFKSLKYDKENAENAKLIDFRKLVEFKKALGVHSLSRQELDQISTHITLIKDNVKLKTVLEKYNLSNEQINNLLEIEFNDYINLSFKALGMILPLMREGKRYDEACEIANLKPKTVDEKKDFLPAFCDSIFAHELSNPVVNRAISEYRKVLNALLKKYGKVHKIHLELARDVGLSKKAREKIEKEQKENQAVNAWALKECENIGLKASAKNILKLKLWKEQKEICIYSGNKISIEHLKDEKALEVDHIYPYSRSFDDSFINKVLVFTKENQEKLNKTPFEAFGKNIEKWSKIQTLAQNLPYKKKNKILDENFKDKQQEDFISRNLNDTRYIATLIAKYTKEYLNFLLLSENENANLKSGEKGSKIHVQTISGMLTSVLRHTWGFDKKDRNNHLHHALDAIIVAYSTNSIIKAFSDFRKNQELLKARFYAKELTSDNYKHQVKFFEPFKSFREKILSKIDEIFVSKPPRKRARRALHKDTFHSENKIIDKCSYNSKEGLQIALSCGRVRKIGTKYVENDTIVRVDIFKKQNKFYAIPIYAMDFALGILPNKIVITGKDKNNNPKQWQTIDESYEFCFSLYKNDLILLQKKNMQEPEFAYYNDFSISTSSICVEKHDNKFENLTSNQKLLFSNAKEGSVKVESLGIQNLKVFEKYIITPLGDKIKADFQPRENISLKTSKKYGLR

SEQ ID NO: 158 - protein, 1395 aa, Treponema denticola
MKKEIKDYFLGLDVGTGSVGWAVTDTDYKLLKANRKDLWGMRCFETAETAEVRRLHRGARRRIERRKKRIKLLQELFSQEIAKTDEGFFQRMKESPFYAEDKTILQENTLFNDKDFADKTYHKAYPTINHLIKAWIENKVKPDPRLLYLACHNIIKKRGHFLFEGDFDSENQFDTSIQALFEYLREDMEVDIDADSQKVKEILKDSSLKNSEKQSRLNKILGLKPSDKQKKAITNLISGNKINFADLYDNPDLKDAEKNSISFSKDDFDALSDDLASILGDSFELLLKAKAVYNCSVLSKVIGDEQYLSFAKVKIYEKHKTDLTKLKNVIKKHFPKDYKKVFGYNKNEKNNNNYSGYVGVCKTKSKKLIINNSVNQEDFYKFLKTILSAKSEIKEVNDILTEIETGTFLPKQISKSNAEIPYQLRKMELEKILSNAEKHFSFLKQKDEKGLSHSEKIIMLLTFKIPYYIGPINDNHKKFFPDRCWVVKKEKSPSGKTTPWNFFDHIDKEKTAEAFITSRTNFCTYLVGESVLPKSSLLYSEYTVLNEINNLQIIIDGKNICDIKLKQKIYEDLFKKYKKITQKQISTFIKHEGICNKTDEVIILGIDKECTSSLKSYIELKNIFGKQVDEISTKNMLEEIIRWATIYDEGEGKTILKTKIKAEYGKYCSDEQIKKILNLKFSGWGRLSRKFLETVTSEMPGFSEPVNIITAMRETQNNLMELLSSEFTFTENIKKINSGFEDAEKQFSYDGLVKPLFLSPSVKKMLWQTLKLVKEISHITQAPPKKIFIEMAKGAELEPARTKTRLKILQDLYNNCKNDADAFSSEIKDLSGKIENEDNLRLRSDKLYLYYTQLGKCMYCGKPIEIGHVFDTSNYDIDHIYPQSKIKDDSISNRVLVCSSCNKNKEDKYPLKSEIQSKQRGFWNFLQRNNFISLEKLNRLTRATPISDDETAKFIARQLVETRQATKVAAKVLEKMFPETKIVYSKAETVSMFRNKFDIVKCREINDFHHAHDAYLNIVVGNVYNTKFTNNPWNFIKEKRDNPKIADTYNYYKVFDYDVKRNNITAWEKGKTIITVKDMLKRNTPIYTRQAACKKGELFNQTIMKKGLGQHPLKKEGPFSNISKYGGYNKVSAAYYTLIEYEEKGNKIRSLETIPLYLVKDIQKDQDVLKSYLTDLLGKKEFKILVPKIKINSLLKINGFPCHITGKTNDSFLLRPAVQFCCSNNEVLYFKKIIRFSEIRSQREKIGKTISPYEDLSFRSYIKENLWKKTKNDEIGEKEFYDLLQKKNLEIYDMLLTKHKDTIYKKRPNSATIDILVKGKEKFKSLIIENQFEVILEILKLFSATRNVSDLQHIGGSKYSGVAKIGNKISSLDNCILIYQSITGIFEKRIDLLKV

SEQ ID NO: 159 - protein, 1345 aa, Streptococcus mutans
MKKPYSIGLDIGTNSVGWAVVTDDYKVPAKKMKVLGNTDKSHIEKNLLGALLFDSGNTAEDRRLKRTARRRYTRRRNRILYLQEIFSEEMGKVDDSFFHRLEDSFLVTEDKRGERHPIFGNLEEEVKYHENFPTIYHLRQYLADNPEKVDLRLVYLALAHIIKFRGHFLIEGKFDTRNNDVQRLFQEFLAVYDNTFENSSLQEQNVQVEEILTDKISKSAKKDRVLKLFPNEKSNGRFAEFLKLIVGNQADFKKHFELEEKAPLQFSKDTYEEELEVLLAQIGDNYAELFLSAKKLYDSILLSGILTVTDVGTKAPLSASMIQRYNEHQMDLAQLKQFIRQKLSDKYNEVFSDVSKDGYAGYIDGKTNQEAFYKYLKGLLNKIEGSGYFLDKIEREDFLRKQRTFDNGSIPHQIHLQEMRAIIRRQAEFYPFLADNQDRIEKLLTFRIPYYVGPLARGKSDFAWLSRKSADKITPWNFDEIVDKESSAEAFINRMTNYDLYLPNQKVLPKHSLLYEKFTVYNELTKVKYKTEQGKTAFFDANMKQEIFDGVFKVYRKVTKDKLMDFLEKEFDEFRIVDLTGLDKENKVFNASYGTYHDLCKILDKDFLDNSKNEKILEDIVLTLTLFEDREMIRKRLENYSDLLTKEQVKKLERRHYTGWGRLSAELIHGIRNKESRKTILDYLIDDGNSNRNFMQLINDDALSFKEEIAKAQVIGETDNLNQVVSDIAGSPAIKKGILQSLKIVDELVKIMGHQPENIVVEMARENQFTNQGRRNSQQRLKGLTDSIKEFGSQILKEHPVENSQLQNDRLFLYYLQNGRDMYTGEELDIDYLSQYDIDHIIPQAFIKDNSIDNRVLTSSKENRGKSDDVPSKDVVRKMKSYWSKLLSAKLITQRKFDNLTKAERGGLTDDDKAGFIKRQLVETRQITKHVARILDERFNTETDENNKKIRQVKIVTLKSNLVSNFRKEFELYKVREINDYHHAHDAYLNAVIGKALLGVYPQLEPEFVYGDYPHFHGHKENKATAKKFFYSNIMNFFKKDDVRTDKNGEIIWKKDEHISNIKKVLSYPQVNIVKKVEEQTGGFSKESILPKGNSDKLIPRKTKKFYWDTKKYGGFDSPIVAYSILVIADIEKGKSKKLKTVKALVGVTIMEKMTFERDPVAFLERKGYRNVQEENIIKLPKYSLFKLENGRKRLLASARELQKGNEIVLPNHLGTLLYHAKNIHKVDEPKHLDYVDKHKDEFKELLDVVSNFSKKYTLAEGNLEKIKELYAQNNGEDLKELASSFINLLTFTAIGAPATFKFFDKNIDRKRYTSTTEILNATLIHQSITGLYETRIDLNKLGGD

SEQ ID NO: 160 - protein, 1388 aa, Streptococcus thermophilus
MTKPYSIGLDIGTNSVGWAVTTDNYKVPSKKMKVLGNTSKKYIKKNLLGVLLFDSGITAEGRRLKRTARRRYTRRRNRILYLQEIFSTEMATLDDAFFQRLDDSFLVPDDKRDSKYPIFGNLVEEKAYHDEFPTIYHLRKYLADSTKKADLRLVYLALAHMIKYRGHFLIEGEFNSKNNDIQKNFQDFLDTYNAIFESDLSLENSKQLEEIVKDKISKLEKKDRILKLFPGEKNSGIFSEFLKLIVGNQADFRKCFNLDEKASLHFSKESYDEDLETLLGYIGDDYSDVFLKAKKLYDAILLSGFLTVTDNETEAPLSSAMIKRYNEHKEDLALLKEYIRNISLKTYNEVFKDDTKNGYAGYIDGKTNQEDFYVYLKKLLAEFEGADYFLEKIDREDFLRKQRTFDNGSIPYQIHLQEMRAILDKQAKFYPFLAKNKERIEKILTFRIPYYVGPLARGNSDFAWSIRKRNEKITPWNFEDVIDKESSAEAFINRMTSFDLYLPEEKVLPKHSLLYETFNVYNELTKVRFIAESMRDYQFLDSKQKKDIVRLYFKDKRKVTDKDIIEYLHAIYGYDGIELKGIEKQFNSSLSTYHDLLNIINDKEFLDDSSNEAIIEEIIHTLTIFEDREMIKQRLSKFENIFDKSVLKKLSRRHYTGWGKLSAKLINGIRDEKSGNTILDYLIDDGISNRNFMQLIHDDALSFKKKIQKAQIIGDEDKGNIKEVVKSLPGSPAIKKGILQSIKIVDELVKVMGGRKPESIVVEMARENQYTNQGKSNSQQRLKRLEKSLKELGSKILKENIPAKLSKIDNNALQNDRLYLYYLQNGKDMYTGDDLDIDRLSNYDIDHIIPQAFLKDNSIDNKVLVSSASNRGKSDDVPSLEVVKKRKTFWYQLLKSKLISQRKFDNLTKAERGGLSPEDKAGFIQRQLVETRQITKHVARLLDEKFNNKKDENNRAVRTVKIITLKSTLVSQFRKDFELYKVREINDFHHAHDAYLNAVVASALLKKYPKLEPEFVYGDYPKYNSFRERKSATEKVYFYSNIMNIFKKSISLADGRVIERPLIEVNEETGESVWNKESDLATVRRVLSYPQVNVVKKVEEQNHGLDRGKPKGLFNANLSSKPKPNSNENLVGAKEYLDPKKYGGYAGISNSFTVLVKGTIEKGAKKKITNVLEFQGISILDRINYRKDKLNFLLEKGYKDIELIIELPKYSLFELSDGSRRMLASILSTNNKRGEIHKGNQIFLSQKFVKLLYHAKRISNTINENHRKYVENHKKEFEELFYYILEFNENYVGAKKNGKLLNSAFQSWQNHSIDELCSSFIGPTGSERKGLFELTSRGSAADFEFLGVKIPRYRDYTPSSLLKDATLIHQSVTGLYETRIDLAKLGEG

SEQ ID NO: 161 - protein, 984 aa, Campylobacter jejuni
MARILAFDIGISSIGWAFSENDELKDCGVRIFTKVENPKTGESLALPRRLARSARKRLARRKARLNHLKHLIANEFKLNYEDYQSFDESLAKAYKGSLISPYELRFRALNELLSKQDFARVILHIAKRRGYDDIKNSDDKEKGAILKAIKQNEEKLANYQSVGEYLYKEYFQKFKENSKEFTNVRNKKESYERCIAQSFLKDELKLIFKKQREFGFSFSKKFEEEVLSVAFYKRALKDFSHLVGNCSFFTDEKRAPKNSPLAFMFVALTRIINLLNNLKNTEGILYTKDDLNALLNEVLKNGTLTYKQTKKLLGLSDDYEFKGEKGTYFIEFKKYKEFIKALGEHNLSQDDLNEIAKDITLIKDEIKLKKALAKYDLNQNQIDSLSKLEFKDHLNISFKALKLVTPLMLEGKKYDEACNELNLKVAINEDKKDFLPAFNETYYKDEVTNPVVLRAIKEYRKVLNALLKKYGKVHKINIELAREVGKNHSQRAKIEKEQNENYKAKKDAELECEKLGLKINSKNILKLRLFKEQKEFCAYSGEKIKISDLQDEKMLEIDHIYPYSRSFDDSYMNKVLVFTKQNQEKLNQTPFEAFGNDSAKWQKIEVLAKNLPTKKQKRILDKNYKDKEQKNFKDRNLNDTRYIARLVLNYTKDYLDFLPLSDDENTKLNDTQKGSKVHVEAKSGMLTSALRHTWGFSAKDRNNHLHHAIDAVIIAYANNSIVKAFSDFKKEQESNSAELYAKKISELDYKNKRKFFEPFSGFRQKVLDKIDEIFVSKPERKKPSGALHEETFRKEEEFYQSYGGKEGVLKALELGKIRKVNGKIVKNGDMFRVDIFKHKKTNKFYAVPIYTMDFALKVLPNKAVARSKKGEIKDWILMDENYEFCFSLYKDSLILIQTKDMQEPEFVYYNAFTSSTVSLIVSKHDNKFETLSKNQKILFKNANEKEVIAKSIGIQNLKVFEKYIVSALGEVTKAEFRQREDFKK

SEQ ID NO: 162 - protein, 1056 aa, Pasteurella multocida
MQTTNLSYILGLDLGIASVGWAVVEINENEDPIGLIDVGVRIFERAEVPKTGESLALSRRLARSTRRLIRRRAHRLLLAKRFLKREGILSTIDLEKGLPNQAWELRVAGLERRLSAIEWGAVLLHLIKHRGYLSKRKNESQTNNKELGALLSGVAQNHQLLQSDDYRTPAELALKKFAKEEGHIRNQRGAYTHTFNRLDLLAELNLLFAQQHQFGNPHCKEHIQQYMTELLMWQKPALSGEAILKMLGKCTHEKNEFKAAKHTYSAERFVWLTKLNNLRILEDGAERALNEEERQLLINHPYEKSKLTYAQVRKLLGLSEQAIFKHLRYSKENAESATFMELKAWHAIRKALENQGLKDTWQDLAKKPDLLDEIGTAFSLYKTDEDIQQYLTNKVPNSVINALLVSLNFDKFIELSLKSLRKILPLMEQGKRYDQACREIYGHHYGEANQKTSQLLPAIPAQEIRNPVVLRTLSQARKVINAIIRQYGSPARVHIETGRELGKSFKERREIQKQQEDNRTKRESAVQKFKELFSDFSSEPKSKDILKFRLYEQQHGKCLYSGKEINIHRLNEKGYVEIDHALPFSRTWDDSFNNKVLVLASENQNKGNQTPYEWLQGKINSERWKNFVALVLGSQCSAAKKQRLLTQVIDDNKFIDRNLNDTRYIARFLSNYIQENLLLVGKNKKNVFTPNGQITALLRSRWGLIKARENNNRHHALDAIVVACATPSMQQKITRFIRFKEVHPYKIENRYEMVDQESGEIISPHFPEPWAYFRQEVNIRVFDNHPDTVLKEMLPDRPQANHQFVQPLFVSRAPTRKMSGQGHMETIKSAKRLAEGISVLRIPLTQLKPNLLENMVNKEREPALYAGLKARLAEFNQDPAKAFATPFYKQGGQQVKAIRVEQVQKSGVLVRENNGVADNASIVRTDVFIKNNKFFLVPIYTWQVAKGILPNKAIVAHKNEDEWEEMDEGAKFKFSLFPNDLVELKTKKEYFFGYYIGLDRATGNISLKEHDGEISKGKDGVYRVGVKLALSFEKYQVDELGKNRQICRPQQRQPVR

SEQ ID NO: 163 - protein, 1629 aa, Francisella tularensis
  source 1..1629: note = Francisella tularensis subsp. novicida
MNFKILPIAIDLGVKNTGVFSAFYQKGTSLERLDNKNGKVYELSKDSYTLLMNNRTARRHQRRGIDRKQLVKRLFKLIWTEQLNLEWDKDTQQAISFLFNRRGFSFITDGYSPEYLNIVPEQVKAILMDIFDDYNGEDDLDSYLKLATEQESKISEIYNKLMQKILEFKLMKLCTDIKDDKVSTKTLKEITSYEFELLADYLANYSESLKTQKFSYTDKQGNLKELSYYHHDKYNIQEFLKRHATINDRILDTLLTDDLDIWNFNFEKFDFDKNEEKLQNQEDKDHIQAHLHHFVFAVNKIKSEMASGGRHRSQYFQEITNVLDENNHQEGYLKNFCENLHNKKYSNLSVKNLVNLIGNLSNLELKPLRKYFNDKIHAKADHWDEQKFTETYCHWILGEWRVGVKDQDKKDGAKYSYKDLCNELKQKVTKAGLVDFLLELDPCRTIPPYLDNNNRKPPKCQSLILNPKFLDNQYPNWQQYLQELKKLQSIQNYLDSFETDLKVLKSSKDQPYFVEYKSSNQQIASGQRDYKDLDARILQFIFDRVKASDELLLNEIYFQAKKLKQKASSELEKLESSKKLDEVIANSQLSQILKSQHTNGIFEQGTFLHLVCKYYKQRQRARDSRLYIMPEYRYDKKLHKYNNTGRFDDDNQLLTYCNHKPRQKRYQLLNDLAGVLQVSPNFLKDKIGSDDDLFISKWLVEHIRGFKKACEDSLKIQKDNRGLLNHKINIARNTKGKCEKEIFNLICKIEGSEDKKGNYKHGLAYELGVLLFGEPNEASKPEFDRKIKKFNSIYSFAQIQQIAFAERKGNANTCAVCSADNAHRMQQIKITEPVEDNKDKIILSAKAQRLPAIPTRIVDGAVKKMATILAKNIVDDNWQNIKQVLSAKHQLHIPIITESNAFEFEPALADVKGKSLKDRRKKALERISPENIFKDKNNRIKEFAKGISAYSGANLTDGDFDGAKEELDHIIPRSHKKYGTLNDEANLICVTRGDNKNKGNRIFCLRDLADNYKLKQFETTDDLEIEKKIADTIWDANKKDFKFGNYRSFINLTPQEQKAFRHALFLADENPIKQAVIRAINNRNRTFVNGTQRYFAEVLANNIYLRAKKENLNTDKISFDYFGIPTIGNGRGIAEIRQLYEKVDSDIQAYAKGDKPQASYSHLIDAMLAFCIAADEHRNDGSIGLEIDKNYSLYPLDKNTGEVFTKDIFSQIKITDNEFSDKKLVRKKAIEGFNTHRQMTRDGIYAENYLPILIHKELNEVRKGYTWKNSEEIKIFKGKKYDIQQLNNLVYCLKFVDKPISIDIQISTLEELRNILTTNNIAATAEYYYINLKTQKLHEYYIENYNTALGYKKYSKEMEFLRSLAYRSERVKIKSIDDVKQVLDKDSNFIIGKITLPFKKEWQRLYREWQNTTIKDDYEFLKSFFNVKSITKLHKKVRKDFSLPISTNEGKFLVKRKTWDNNFIYQILNDSDSRADGTKPFIPAFDISKNEIVEAIIDSFTSKNIFWLPKNIELQKVDNKNIFAIDTSKWFEVETPSDLRDIGIATIQYKIDNNSRPKVRVKLDYVIDDDSKINYFMNHSLLKSRYPDKVLEILKQSTIIEFESSGFNKTIKEMLGMKLAGIYNETSNN

SEQ ID NO: 164 - protein, 1371 aa, Lactobacillus buchneri
MKVNNYHIGLDIGTSSIGWVAIGKDGKPLRVKGKTAIGARLFQEGNPAADRRMFRTTRRRLSRRKWRLKLLEEIFDPYITPVDSTFFARLKQSNLSPKDSRKEFKGSMLFPDLTDMQYHKNYPTIYHLRHALMTQDKKFDIRMVYLAIHHIVKYRGNFLNSTPVDSFKASKVDFVDQFKKLNELYAAINPEESFKINLANSEDIGHQFLDPSIRKFDKKKQIPKIVPVMMNDKVTDRLNGKIASEIIHAILGYKAKLDVVLQCTPVDSKPWALKFDDEDIDAKLEKILPEMDENQQSIVAILQNLYSQVTLNQIVPNGMSLSESMIEKYNDHHDHLKLYKKLIDQLADPKKKAVLKKAYSQYVGDDGKVIEQAEFWSSVKKNLDDSELSKQIMDLIDAEKFMPKQRTSQNGVIPHQLHQRELDEIIEHQSKYYPWLVEINPNKHDLHLAKYKIEQLVAFRVPYYVGPMITPKDQAESAETVFSWMERKGTETGQITPWNFDEKVDRKASANRFIKRMTTKDTYLIGEDVLPDESLLYEKFKVLNELNMVRVNGKLLKVADKQAIFQDLFENYKHVSVKKLQNYIKAKTGLPSDPEISGLSDPEHFNNSLGTYNDFKKLFGSKVDEPDLQDDFEKIVEWSTVFEDKKILREKLNEITWLSDQQKDVLESSRYQGWGRLSKKLLTGIVNDQGERIIDKLWNTNKNFMQIQSDDDFAKRIHEANADQMQAVDVEDVLADAYTSPQNKKAIRQVVKVVDDIQKAMGGVAPKYISIEFTRSEDRNPRRTISRQRQLENTLKDTAKSLAKSINPELLSELDNAAKSKKGLTDRLYLYFTQLGKDIYTGEPINIDELNKYDIDHILPQAFIKDNSLDNRVLVLTAVNNGKSDNVPLRMFGAKMGHFWKQLAEAGLISKRKLKNLQTDPDTISKYAMHGFIRRQLVETSQVIKLVANILGDKYRNDDTKIIEITARMNHQMRDEFGFIKNREINDYHHAFDAYLTAFLGRYLYHRYIKLRPYFVYGDFKKFREDKVTMRNFNFLHDLTDDTQEKIADAETGEVIWDRENSIQQLKDVYHYKFMLISHEVYTLRGAMFNQTVYPASDAGKRKLIPVKADRPVNVYGGYSGSADAYMAIVRIHNKKGDKYRVVGVPMRALDRLDAAKNVSDADFDRALKDVLAPQLTKTKKSRKTGEITQVIEDFEIVLGKVMYRQLMIDGDKKFMLGSSTYQYNAKQLVLSDQSVKTLASKGRLDPLQESMDYNNVYTEILDKVNQYFSLYDMNKFRHKLNLGFSKFISFPNHNVLDGNTKVSSGKREILQEILNGLHANPTFGNLKDVGITTPFGQLQQPNGILLSDETKIRYQSPTGLFERTVSLKDL

SEQ ID NO: 165 - protein, 1334 aa, Listeria innocua
MKKPYTIGLDIGTNSVGWAVLTDQYDLVKRKMKIAGDSEKKQIKKNFWGVRLFDEGQTAADRRMARTARRRIERRRNRISYLQGIFAEEMSKTDANFFCRLSDSFYVDNEKRNSRHPFFATIEEEVEYHKNYPTIYHLREELVNSSEKADLRLVYLALAHIIKYRGNFLIEGALDTQNTSVDGIYKQFIQTYNQVFASGIEDGSLKKLEDNKDVAKILVEKVTRKEKLERILKLYPGEKSAGMFAQFISLIVGSKGNFQKPFDLIEKSDIECAKDSYEEDLESLLALIGDEYAELFVAAKNAYSAVVLSSIITVAETETNAKLSASMIERFDTHEEDLGELKAFIKLHLPKHYEEIFSNTEKHGYAGYIDGKTKQADFYKYMKMTLENIEGADYFIAKIEKENFLRKQRTFDNGAIPHQLHLEELEAILHQQAKYYPFLKENYDKIKSLVTFRIPYFVGPLANGQSEFAWLTRKADGEIRPWNIEEKVDFGKSAVDFIEKMTNKDTYLPKENVLPKHSLCYQKYLVYNELTKVRYINDQGKTSYFSGQEKEQIFNDLFKQKRKVKKKDLELFLRNMSHVESPTIEGLEDSFNSSYSTYHDLLKVGIKQEILDNPVNTEMLENIVKILTVFEDKRMIKEQLQQFSDVLDGVVLKKLERRHYTGWGRLSAKLLMGIRDKQSHLTILDYLMNDDGLNRNLMQLINDSNLSFKSIIEKEQVTTADKDIQSIVADLAGSPAIKKGILQSLKIVDELVSVMGYPPQTIVVEMARENQTTGKGKNNSRPRYKSLEKAIKEFGSQILKEHPTDNQELRNNRLYLYYLQNGKDMYTGQDLDIHNLSNYDIDHIVPQSFITDNSIDNLVLTSSAGNREKGDDVPPLEIVRKRKVFWEKLYQGNLMSKRKFDYLTKAERGGLTEADKARFIHRQLVETRQITKNVANILHQRFNYEKDDHGNTMKQVRIVTLKSALVSQFRKQFQLYKVRDVNDYHHAHDAYLNGVVANTLLKVYPQLEPEFVYGDYHQFDWFKANKATAKKQFYTNIMLFFAQKDRIIDENGEILWDKKYLDTVKKVMSYRQMNIVKKTEIQKGEFSKATIKPKGNSSKLIPRKTNWDPMKYGGLDSPNMAYAVVIEYAKGKNKLVFEKKIIRVTIMERKAFEKDEKAFLEEQGYRQPKVLAKLPKYTLYECEEGRRRMLASANEAQKGNQQVLPNHLVTLLHHAANCEVSDGKSLDYIESNREMFAELLAHVSEFAKRYTLAEANLNKINQLFEQNKEGDIKAIAQSFVDLMAFNAMGAPASFKFFETTIERKRYNNLKELLNSTIIYQSITGLYESRKRLDD

SEQ ID NO: 166 - protein, 1372 aa, Legionella pneumophila
MESSQILSPIGIDLGGKFTGVCLSHLEAFAELPNHANTKYSVILIDHNNFQLSQAQRRATRHRVRNKKRNQFVKRVALQLFQHILSRDLNAKEETALCHYLNNRGYTYVDTDLDEYIKDETTINLLKELLPSESEHNFIDWFLQKMQSSEFRKILVSKVEEKKDDKELKNAVKNIKNFITGFEKNSVEGHRHRKVYFENIKSDITKDNQLDSIKKKIPSVCLSNLLGHLSNLQWKNLHRYLAKNPKQFDEQTFGNEFLRMLKNFRHLKGSQESLAVRNLIQQLEQSQDYISILEKTPPEITIPPYEARTNTGMEKDQSLLLNPEKLNNLYPNWRNLIPGIIDAHPFLEKDLEHTKLRDRKRIISPSKQDEKRDSYILQRYLDLNKKIDKFKIKKQLSFLGQGKQLPANLIETQKEMETHFNSSLVSVLIQIASAYNKEREDAAQGIWFDNAFSLCELSNINPPRKQKILPLLVGAILSEDFINNKDKWAKFKIFWNTHKIGRTSLKSKCKEIEEARKNSGNAFKIDYEEALNHPEHSNNKALIKIIQTIPDIIQAIQSHLGHNDSQALIYHNPFSLSQLYTILETKRDGFHKNCVAVTCENYWRSQKTEIDPEISYASRLPADSVRPFDGVLARMMQRLAYEIAMAKWEQIKHIPDNSSLLIPIYLEQNRFEFEESFKKIKGSSSDKTLEQAIEKQNIQWEEKFQRIINASMNICPYKGASIGGQGEIDHIYPRSLSKKHFGVIFNSEVNLIYCSSQGNREKKEEHYLLEHLSPLYLKHQFGTDNVSDIKNFISQNVANIKKYISFHLLTPEQQKAARHALFLDYDDEAFKTITKFLMSQQKARVNGTQKFLGKQIMEFLSTLADSKQLQLEFSIKQITAEEVHDHRELLSKQEPKLVKSRQQSFPSHAIDATLTMSIGLKEFPQFSQELDNSWFINHLMPDEVHLNPVRSKEKYNKPNISSTPLFKDSLYAERFIPVWVKGETFAIGFSEKDLFEIKPSNKEKLFTLLKTYSTKNPGESLQELQAKSKAKWLYFPINKTLALEFLHHYFHKEIVTPDDTTVCHFINSLRYYTKKESITVKILKEPMPVLSVKFESSKKNVLGSFKHTIALPATKDWERLFNHPNFLALKANPAPNPKEFNEFIRKYFLSDNNPNSDIPNNGHNIKPQKHKAVRKVFSLPVIPGNAGTMMRIRRKDNKGQPLYQLQTIDDTPSMGIQINEDRLVKQEVLMDAYKTRNLSTIDGINNSEGQAYATFDNWLTLPVSTFKPEIIKLEMKPHSKTRRYIRITQSLADFIKTIDEALMIKPSDSIDDPLNMPNEIVCKNKLFGNELKPRDGKMKIVSTGKIVTYEFESDSTPQWIQTLYVTQLKKQP

SEQ ID NO: 167 - protein, 1082 aa, Neisseria lactamica
MAAFKPNPMNYILGLDIGIASVGWAMVEVDEEENPIRLIDLGVRVFERAEVPKTGDSLAMARRLARSVRRLTRRRAHRLLRARRLLKREGVLQDADFDENGLVKSLPNTPWQLRAAALDRKLTCLEWSAVLLHLVKHRGYLSQRKNEGETADKELGALLKGVADNAHALQTGDFRTPAELALNKFEKESGHIRNQRGDYSHTFSRKDLQAELNLLFEKQKEFGNPHVSDGLKEDIETLLMAQRPALSGDAVQKMLGHCTFEPAEPKAAKNTYTAERFIWLTKLNNLRILEQGSERPLTDTERATLMDEPYRKSKLTYAQARKLLGLEDTAFFKGLRYGKDNAEASTLMEMKAYHAISRALEKEGLKDKKSPLNLSTELQDEIGTAFSLFKTDKDITGRLKDRVQPEILEALLKHISFDKFVQISLKALRRIVPLMEQGKRYDEACAEIYGDHYCKKNAEEKIYLPPIPADEIRNPVVLRALSQARKVINCVVRRYGSPARIHIETAREVGKSFKDRKEIEKRQEENRKDREKAAAKFREYFPNFVGEPKSKDILKLRLYEQQHGKCLYSGKEINLVRLNEKGYVEIDHALPFSRTWDDSFNNKVLVLGSENQNKGNQTPYEYFNGKDNSREWQEFKARVETSRFPRSKKQRILLQKFDEEGFKERNLNDTRYVNRFLCQFVADHILLTGKGKRRVFASNGQITNLLRGFWGLRKVRTENDRHHALDAVVVACSTVAMQQKITRFVRYKEMNAFDGKTIDKETGEVLHQKAHFPQPWEFFAQEVMIRVFGKPDGKPEFEEADTPEKLRTLLAEKLSSRPEAVHEYVTPLFVSRAPNRKMSGQGHMETVKSAKRLDEGISVLRVPLTQLKLKGLEKMVNREREPKLYDALKAQLETHKDDPAKAFAEPFYKYDKAGSRTQQVKAVRIEQVQKTGVWVRNHNGIADNATMVRVDVFEKGGKYYLVPIYSWQVAKGILPDRAVVAFKDEEDWTVMDDSFEFRFVLYANDLIKLTAKKNEFLGYFVSLNRATGAIDIRTHDTDSTKGKNGIFQSVGVKTALSFQKNQIDELGKEIRPCRLKKRPPVR

SEQ ID NO: 168 - protein, 1082 aa, Neisseria meningitidis; identical to SEQ ID NO: 152

SEQ ID NO: 169 - protein, 1187 aa, Bifidobacterium longum
MLSRQLLGASHLARPVSYSYNVQDNDVHCSYGERCFMRGKRYRIGIDVGLNSVGLAAVEVSDENSPVRLLNAQSVIHDGGVDPQKNKEAITRKNMSGVARRTRRMRRRKRERLHKLDMLLGKFGYPVIEPESLDKPFEEWHVRAELATRYIEDDELRRESISIALRHMARHRGWRNPYRQVDSLISDNPYSKQYGELKEKAKAYNDDATAAEEESTPAQLVVAMLDAGYAEAPRLRWRTGSKKPDAEGYLPVRLMQEDNANELKQIFRVQRVPADEWKPLFRSVFYAVSPKGSAEQRVGQDPLAPEQARALKASLAFQEYRIANVITNLRIKDASAELRKLTVDEKQSIYDQLVSPSSEDITWSDLCDFLGFKRSQLKGVGSLTEDGEERISSRPPRLTSVQRIYESDNKIRKPLVAWWKSASDNEHEAMIRLLSNTVDIDKVREDVAYASAIEFIDGLDDDALTKLDSVDLPSGRAAYSVETLQKLTRQMLTTDDDLHEARKTLFNVTDSWRPPADPIGEPLGNPSVDRVLKNVNRYLMNCQQRWGNPVSVNIEHVRSSFSSVAFARKDKREYEKNNEKRSIFRSSLSEQLRADEQMEKVRESDLRRLEAIQRQNGQCLYCGRTITFRTCEMDHIVPRKGVGSTNTRTNFAAVCAECNRMKSNTPFAIWARSEDAQTRGVSLAEAKKRVTMFTFNPKSYAPREVKAFKQAVIARLQQTEDDAAIDNRSIESVAWMADELHRRIDWYFNAKQYVNSASIDDAEAETMKTTVSVFQGRVTASARRAAGIEGKIHFIGQQSKTRLDRRHHAVDASVIAMMNTAAAQTLMERESLRESQRLIGLMPGERSWKEYPYEGTSRYESFHLWLDNMDVLLELLNDALDNDRIAVMQSQRYVLGNSIAHDATIHPLEKVPLGSAMSADLIRRASTPALWCALTRLPDYDEKEGLPEDSHREIRVHDTRYSADDEMGFFASQAAQIAVQEGSADIGSAIHHARVYRCWKTNAKGVRKYFYGMIRVFQTDLLRACHDDLFTVPLPPQSISMRYGEPRVVQALQSGNAQYLGSLVVGDEIEMDFSSLDVDGQIGEYLQFFSQFSGGNLAWKHWVVDGFFNQTQLRIRPRYLAAEGLAKAFSDDVVPDGVQKIVTKQGWLPPVNTASKTAVRIVRRNAFGEPRLSSAHHMPCSWQWRHE

SEQ ID NO: 170 - protein, 1101 aa, Akkermansia muciniphila
MSRSLTFSFDIGYASIGWAVIASASHDDADPSVCGCGTVLFPKDDCQAFKRREYRRLRRNIRSRRVRIERIGRLLVQAQIITPEMKETSGHPAPFYLASEALKGHRTLAPIELWHVLRWYAHNRGYDNNASWSNSLSEDGGNGEDTERVKHAQDLMDKHGTATMAETICRELKLEEGKADAPMEVSTPAYKNLNTAFPRLIVEKEVRRILELSAPLIPGLTAEIIELIAQHHPLTTEQRGVLLQHGIKLARRYRGSLLFGQLIPRFDNRIISRCPVTWAQVYEAELKKGNSEQSARERAEKLSKVPTANCPEFYEYRMARILCNIRADGEPLSAEIRRELMNQARQEGKLTKASLEKAISSRLGKETETNVSNYFTLHPDSEEALYLNPAVEVLQRSGIGQILSPSVYRIAANRLRRGKSVTPNYLLNLLKSRGESGEALEKKIEKESKKKEADYADTPLKPKYATGRAPYARTVLKKVVEEILDGEDPTRPARGEAHPDGELKAHDGCLYCLLDTDSSVNQHQKERRLDTMTNNHLVRHRMLILDRLLKDLIQDFADGQKDRISRVCVEVGKELTTFSAMDSKKIQRELTLRQKSHTDAVNRLKRKLPGKALSANLIRKCRIAMDMNWTCPFTGATYGDHELENLELEHIVPHSFRQSNALSSLVLTWPGVNRMKGQRTGYDFVEQEQENPVPDKPNLHICSLNNYRELVEKLDDKKGHEDDRRRKKKRKALLMVRGLSHKHQSQNHEAMKEIGMTEGMMTQSSHLMKLACKSIKTSLPDAHIDMIPGAVTAEVRKAWDVFGVFKELCPEAADPDSGKILKENLRSLTHLHHALDACVLGLIPYIIPAHHNGLLRRVLAMRRIPEKLIPQVRPVANQRHYVLNDDGRMMLRDLSASLKENIREQLMEQRVIQHVPADMGGALLKETMQRVLSVDGSGEDAMVSLSKKKDGKKEKNQVKASKLVGVFPEGPSKLKALKAAIEIDGNYGVALDPKPVVIRHIKVFKRIMALKEQNGGKPVRILKKGMLIHLTSSKDPKHAGVWRIESIQDSKGGVKLDLQRAHCAVPKNKTHECNWREVDLISLLKKYQMKRYPTSYTGTPR

SEQ ID NO: 171 - protein, 1498 aa, Odoribacter laneus
METTLGIDLGTNSIGLALVDQEEHQILYSGVRIFPEGINKDTIGLGEKEESRNATRRAKRQMRRQYFRKKLRKAKLLELLIAYDMCPLKPEDVRRWKNWDKQQKSTVRQFPDTPAFREWLKQNPYELRKQAVTEDVTRPELGRILYQMIQRRGFLSSRKGKEEGKIFTGKDRMVGIDETRKNLQKQTLGAYLYDIAPKNGEKYRFRTERVRARYTLRDMYIREFEIIWQRQAGHLGLAHEQATRKKNIFLEGSATNVRNSKLITHLQAKYGRGHVLIEDTRITVTFQLPLKEVLGGKIEIEEEQLKFKSNESVLFWQRPLRSQKSLLSKCVFEGRNFYDPVHQKWIIAGPTPAPLSHPEFEEFRAYQFINNIIYGKNEHLTAIQREAVFELMCTESKDFNFEKIPKHLKLFEKFNFDDTTKVPACTTISQLRKLFPHPVWEEKREEIWHCFYFYDDNTLLFEKLQKDYALQTNDLEKIKKIRLSESYGNVSLKAIRRINPYLKKGYAYSTAVLLGGIRNSFGKRFEYFKEYEPEIEKAVCRILKEKNAEGEVIRKIKDYLVHNRFGFAKNDRAFQKLYHHSQAITTQAQKERLPETGNLRNPIVQQGLNELRRTVNKLLATCREKYGPSFKFDHIHVEMGRELRSSKTEREKQSRQIRENEKKNEAAKVKLAEYGLKAYRDNIQKYLLYKEIEEKGGTVCCPYTGKTLNISHTLGSDNSVQIEHIIPYSISLDDSLANKTLCDATFNREKGELTPYDFYQKDPSPEKWGASSWEEIEDRAFRLLPYAKAQRFIRRKPQESNEFISRQLNDTRYISKKAVEYLSAICSDVKAFPGQLTAELRHLWGLNNILQSAPDITFPLPVSATENHREYYVITNEQNEVIRLFPKQGETPRTEKGELLLTGEVERKVFRCKGMQEFQTDVSDGKYWRRIKLSSSVTWSPLFAPKPISADGQIVLKGRIEKGVFVCNQLKQKLKTGLPDGSYWISLPVISQTFKEGESVNNSKLTSQQVQLFGRVREGIFRCHNYQCPASGADGNFWCTLDTDTAQPAFTPIKNAPPGVGGGQIILTGDVDDKGIFHADDDLHYELPASLPKGKYYGIFTVESCDPTLIPIELSAPKTSKGENLIEGNIWVDEHTGEVRFDPKKNREDQRHHAIDAIVIALSSQSLFQRLSTYNARRENKKRGLDSTEHFPSPWPGFAQDVRQSVVPLLVSYKQNPKTLCKISKTLYKDGKKIHSCGNAVRGQLHKETVYGQRTAPGATEKSYHIRKDIRELKTSKHIGKVVDITIRQMLLKHLQENYHIDITQEFNIPSNAFFKEGVYRIFLPNKHGEPVPIKKIRMKEELGNAERLKDNINQYVNPRNNHHVMIYQDADGNLKEEIVSFWSVIERQNQGQPIYQLPREGRNIVSILQINDTFLIGLKEEEPEVYRNDLSTLSKHLYRVQKLSGMYYTFRHHLASTLNNEREEFRIQSLEAWKRANPVKVQIDEIGRITFLNGPLC

SEQ ID NO: 172 - protein, 1300 aa, Francisella tularensis
  source 1..1300: note = Francisella tularensis subsp. Novicida
MSIYQEFVNKYSLSKTLRFELIPQGKTLENIKARGLILDDEKRAKDYKKAKQIIDKYHQFFIEEILSSVCISEDLLQNYSDVYFKLKKSDDDNLQKDFKSAKDTIKKQISEYIKDSEKFKNLFNQNLIDAKKGQESDLILWLKQSKDNGIELFKANSDITDIDEALEIIKSFKGWTTYFKGFHENRKNVYSSNDIPTSIIYRIVDDNLPKFLENKAKYESLKDKAPEAINYEQIKKDLAEELTFDIDYKTSEVNQRVFSLDEVFEIANFNNYLNQSGITKFNTIIGGKFVNGENTKRKGINEYINLYSQQINDKTLKKYKMSVLFKQILSDTESKSFVIDKLEDDSDVVTTMQSFYEQIAAFKTVEEKSIKETLSLLFDDLKAQKLDLSKIYFKNDKSLTDLSQQVFDDYSVIGTAVLEYITQQIAPKNLDNPSKKEQELIAKKTEKAKYLSLETIKLALEEFNKHRDIDKQCRFEEILANFAAIPMIFDEIAQNKDNLAQISIKYQNQGKKDLLQASAEDDVKAIKDLLDQTNNLLHKLKIFHISQSEDKANILDKDEHFYLVFEECYFELANIVPLYNKIRNYITQKPYSDEKFKLNFENSTLANGWDKNKEPDNTAILFIKDDKYYLGVMNKKNNKIFDDKAIKENKGEGYKKIVYKLLPGANKMLPKVFFSAKSIKFYNPSEDILRIRNHSTHTKNGSPQKGYEKFEFNIEDCRKFIDFYKQSISKHPEWKDFGFRFSDTQRYNSIDEFYREVENQGYKLTFENISESYIDSVVNQGKLYLFQIYNKDFSAYSKGRPNLHTLYWKALFDERNLQDVVYKLNGEAELFYRKQSIPKKITHPAKEAIANKNKDNPKKESVFEYDLIKDKRFTEDKFFFHCPITINFKSSGANKFNDEINLLLKEKANDVHILSIDRGERHLAYYTLVDGKGNIIKQDTFNIIGNDRMKTNYHDKLAAIEKDRDSARKDWKKINNIKEMKEGYLSQVVHEIAKLVIEYNAIVVFEDLNFGFKRGRFKVEKQVYQKLEKMLIEKLNYLVFKDNEFDKTGGVLRAYQLTAPFETFKKMGKQTGIIYYVPAGFTSKICPVTGFVNQLYPKYESVSKSQEFFSKFDKICYNLDKGYFEFSFDYKNFGDKAAKGKWTIASFGSRLINFRNSDKNHNWDTREVYPTKELEKLLKDYSIEYGHGECIKAAICGESDKKFFAKLTSVLNTILQMRNSKTGTELDYLISPVADVNGNFFDSRQAPKNMPQDADANGAYHIGLKGLMLLGRIKNNQEGKKLNLVIKNEEYFEFVQNRNN

SEQ ID NO: 173 - protein, 1228 aa, unidentified
  source 1..1228: note = Lachnospiraceae bacterium sp. ND2006
AASKLEKFTNCYSLSKTLRFKAIPVGKTQENIDNKRLLVEDEKRAEDYKGVKKLLDRYYLSFINDVLHSIKLKNLNNYISLFRKKTRTEKENKELENLEINLRKEIAKAFKGAAGYKSLFKKDIIETILPEAADDKDEIALVNSFNGFTTAFTGFFDNRENMFSEEAKSTSIAFRCINENLTRYISNMDIFEKVDAIFDKHEVQEIKEKILNSDYDVEDFFEGEFFNFVLTQEGIDVYNAIIGGFVTESGEKIKGLNEYINLYNAKTKQALPKFKPLYKQVLSDRESLSFYGEGYTSDEEVLEVFRNTLNKNSEIFSSIKKLEKLFKNFDEYSSAGIFVKNGPAISTISKDIFGEWNLIRDKWNAEYDDIHLKKKAVVTEKYEDDRRKSFKKIGSFSLEQLQEYADADLSVVEKLKEIIIQKVDEIYKVYGSSEKLFDADFVLEKSLKKNDAVVAIMKDLLDSVKSFENYIKAFFGEGKETNRDESFYGDFVLAYDILLKVDHIYDAIRNYVTQKPYSKDKFKLYFQNPQFMGGWDKDKETDYRATILRYGSKYYLAIMDKKYAKCLQKIDKDDVNGNYEKINYKLLPGPNKMLPKVFFSKKWMAYYNPSEDIQKIYKNGTFKKGDMFNLNDCHKLIDFFKDSISRYPKWSNAYDFNFSETEKYKDIAGFYREVEEQGYKVSFESASKKEVDKLVEEGKLYMFQIYNKDFSDKSHGTPNLHTMYFKLLFDENNHGQIRLSGGAELFMRRASLKKEELVVHPANSPIANKNPDNPKKTTTLSYDVYKDKRFSEDQYELHIPIAINKCPKNIFKINTEVRVLLKHDDNPYVIGIDRGERNLLYIVVVDGKGNIVEQYSLNEIINNFNGIRIKTDYHSLLDKKEKERFEARQNWTSIENIKELKAGYISQVVHKICELVEKYDAVIALEDLNSGFKNSRVKVEKQVYQKFEKMLIDKLNYMVDKKSNPCATGGALKGYQITNKFESFKSMSTQNGFIFYIPAWLTSKIDPSTGFVNLLKTKYTSIADSKKFISSFDRIMYVPEEDLFEFALDYKNFSRTDADYIKKWKLYSYGNRIRIFAAAKKNNVFAWEEVCLTSAYKELFNKYGINYQQGDIRALLCEQSDKAFYSSFMALMSLMLQMRNSITGRTDVDFLISPVKNSDGIFYDSRNYEAQENAILPKNADANGAYNIARKVLWAIGQFKKAEDEKLDKVKIAISNKEWLEYAQTSVK

SEQ ID NO: 174 - protein, 1307 aa, Acidaminococcus sp.
  source 1..1307: note = Acidaminococcus sp. BV3L6
MTQFEGFTNLYQVSKTLRFELIPQGKTLKHIQEQGFIEEDKARNDHYKELKPIIDRIYKTYADQCLQLVQLDWENLSAAIDSYRKEKTEETRNALIEEQATYRNAIHDYFIGRTDNLTDAINKRHAEIYKGLFKAELFNGKVLKQLGTVTTTEHENALLRSFDKFTTYFSGFYENRKNVFSAEDISTAIPHRIVQDNFPKFKENCHIFTRLITAVPSLREHFENVKKAIGIFVSTSIEEVFSFPFYNQLLTQTQIDLYNQLLGGISREAGTEKIKGLNEVLNLAIQKNDETAHIIASLPHRFIPLFKQILSDRNTLSFILEEFKSDEEVIQSFCKYKTLLRNENVLETAEALFNELNSIDLTHIFISHKKLETISSALCDHWDTLRNALYERRISELTGKITKSAKEKVQRSLKHEDINLQEIISAAGKELSEAFKQKTSEILSHAHAALDQPLPTTLKKQEEKEILKSQLDSLLGLYHLLDWFAVDESNEVDPEFSARLTGIKLEMEPSLSFYNKARNYATKKPYSVEKFKLNFQMPTLASGWDVNKEKNNGAILFVKNGLYYLGIMPKQKGRYKALSFEPTEKTSEGFDKMYYDYFPDAAKMIPKCSTQLKAVTAHFQTHTTPILLSNNFIEPLEITKEIYDLNNPEKEPKKFQTAYAKKTGDQKGYREALCKWIDFTRDFLSKYTKTTSIDLSSLRPSSQYKDLGEYYAELNPLLYHISFQRIAEKEIMDAVETGKLYLFQIYNKDFAKGHHGKPNLHTLYWTGLFSPENLAKTSIKLNGQAELFYRPKSRMKRMAHRLGEKMLNKKLKDQKTPIPDTLYQELYDYVNHRLSHDLSDEARALLPNVITKEVSHEIIKDRRFTSDKFFFHVPITLNYQAANSPSKFNQRVNAYLKEHPETPIIGIDRGERNLIYITVIDSTGKILEQRSLNTIQQFDYQKKLDNREKERVAARQAWSVVGTIKDLKQGYLSQVIHEIVDLMIHYQAVVVLENLNFGFKSKRTGIAEKAVYQQFEKMLIDKLNCLVLKDYPAEKVGGVLNPYQLTDQFTSFAKMGTQSGFLFYVPAPYTSKIDPLTGFVDPFVWKTIKNHESRKHFLEGFDFLHYDVKTGDFILHFKMNRNLSFQRGLPGFMPAWDIVFEKNETQFDAKGTPFIAGKRIVPVIENHRFTGRYRDLYPANELIALLEEKGIVFRDGSNILPKLLENDDSHAIDTMVALIRSVLQMRNSNAATGEDYINSPVRDLNGVCFDSRFQNPEWPMDADANGAYHIALKGQLLLNHLKESKDLKLQNGISNQDWLAYIQELRN

SEQ ID NO: 175 - DNA, 28 bp, Leptotrichia shahii
  source 1..28: mol_type = genomic DNA
ccaccccaatatcgaaggggactaaaac

SEQ ID NO: 176 - DNA, 36 bp, Leptotrichia wadei
  source 1..36: mol_type = genomic DNA
gatttagactaccccaaaaacgaaggggactaaaac

SEQ ID NO: 177 - DNA, 36 bp, Listeria seeligeri
  source 1..36: mol_type = genomic DNA
gtaagagactacctctatatgaaagaggactaaaac

SEQ ID NO: 178 - DNA, 35 bp, unidentified
  source 1..35: mol_type = genomic DNA; note = Lachnospiraceae bacterium MA2020
gtattgagaaaagccagatatagttggcaatagac

SEQ ID NO: 179 - DNA, 35 bp, unidentified
  source 1..35: mol_type = genomic DNA; note = Lachnospiraceae bacterium NK4A179
gttgatgagaagagcccaagatagagggcaataac

SEQ ID NO: 180 - DNA, 35 bp, Clostridium aminophilum
  source 1..35: mol_type = genomic DNA; note = Clostridium aminophilum DSM 10710
gtctattgccctctatatcgggctgttctccaaac

SEQ ID NO: 181 - DNA, 36 bp, Carnobacterium gallinarum
  source 1..36: mol_type = genomic DNA; note = Carnobacterium gallinarum DSM 4847
attaaagactacctctaaatgtaagaggactataac

SEQ ID NO: 182 - DNA, 36 bp, Carnobacterium gallinarum
  source 1..36: mol_type = genomic DNA; note = Carnobacterium gallinarum DSM 4847
aatataaactacctctaaatgtaagaggactataac

SEQ ID NO: 183 - DNA, 36 bp, Paludibacter propionicigenes
  source 1..36: mol_type = genomic DNA; note = Paludibacter propionicigenes WB4
cttgtggattatcccaaaattgaagggaactacaac

SEQ ID NO: 184 - DNA, 36 bp, unidentified
  source 1..36: mol_type = genomic DNA; note = Listeria weihenstephanensis FSL R9-0317
gatttagagtacctcaaaatagaagaggtctaaaac

SEQ ID NO: 185 - DNA, 36 bp, unidentified
  source 1..36: mol_type = other DNA; note = Listeriaceae bacterium FSL M6-0635
gatttagagtacctcaaaacaaaagaggactaaaac

SEQ ID NO: 186 - DNA, 36 bp, Leptotrichia wadei
  source 1..36: mol_type = genomic DNA; note = Leptotrichia wadei F0279
gatatagataaccccaaaaacgaagggatctaaaac

SEQ ID NO: 187 - DNA, 36 bp, Rhodobacter capsulatus
  source 1..36: mol_type = genomic DNA; note = Rhodobacter capsulatus SB 1003
gcctcacatcaccgccaagacgacggcggactgaac

SEQ ID NO: 188 - DNA, 36 bp, Rhodobacter capsulatus; identical to SEQ ID NO: 187
  source 1..36: mol_type = genomic DNA; note = Rhodobacter capsulatus R121

SEQ ID NO: 189 - DNA, 36 bp, Rhodobacter capsulatus; identical to SEQ ID NO: 187
  source 1..36: mol_type = genomic DNA; note = Rhodobacter capsulatus DE442

SEQ ID NO: 190 - protein, 1389 aa, unidentified
  REGION 1..1389: note = Cas13a
MGNLFGHKRWYEVRDKKDFKIKRKVKVKRNYDGNKYILNINENNNKEKIDNNKFIRKYINYKKNDNILKEFTRKFHAGNILFKLKGKEGIIRIENNDDFLETEEVVLYIEAYGKSEKLKALGITKKKIIDEAIRQGITKDDKKIEIKRQENEEEIEIDIRDEYTNKTLNDCSIILRIIENDELETKKSIYEIFKNINMSLYKIIEKIIENETEKVFENRYYEEHLREKLLKDDKIDVILTNFMEIREKIKSNLEILGFVKFYLNVGGDKKKSKNKKMLVEKILNINVDLTVEDIADFVIKELEFWNITKRIEKVKKVNNEFLEKRRNRTYIKSYVLLDKHEKFKIERENKKDKIVKFFVENIKNNSIKEKIEKILAEFKIDELIKKLEKELKKGNCDTEIFGIFKKHYKVNFDSKKFSKKSDEEKELYKIIYRYLKGRIEKILVNEQKVRLKKMEKIEIEKILNESILSEKILKRVKQYTLEHIMYLGKLRHNDIDMTTVNTDDFSRLHAKEELDLELITFFASTNMELNKIFSRENINNDENIDFFGGDREKNYVLDKKILNSKIKIIRDLDFIDNKNNITNNFIRKFTKIGTNERNRILHAISKERDLQGTQDDYNKVINIIQNLKISDEEVSKALNLDVVFKDKKNIITKINDIKISEENNNDIKYLPSFSKVLPEILNLYRNNPKNEPFDTIETEKIVLNALIYVNKELYKKLILEDDLEENESKNIFLQELKKTLGNIDEIDENIIENYYKNAQISASKGNNKAIKKYQKKVIECYIGYLRKNYEELFDFSDFKMNIQEIKKQIKDINDNKTYERITVKTSDKTIVINDDFEYIISIFALLNSNAVINKIRNRFFATSVWLNTSEYQNIIDILDEIMQLNTLRNECITENWNLNLEEFIQKMKEIEKDFDDFKIQTKKEIFNNYYEDIKNNILTEFKDDINGCDVLEKKLEKIVIFDDETKFEIDKKSNILQDEQRKLSNINKKDLKKKVDQYIKDKDQEIKSKILCRIIFNSDFLKKYKKEIDNLIEDMESENENKFQEIYYPKERKNELYIYKKNLFLNIGNPNFDKIYGLISNDIKMADAKFLFNIDGKNIRKNKISEIDAILKNLNDKLNGYSKEYKEKYIKKLKENDDFFAKNIQNKNYKSFEKDYNRVSEYKKIRDLVEFNYLNKIESYLIDINWKLAIQMARFERDMHYIVNGLRELGIIKLSGYNTGISRAYPKRNGSDGFYTTTAYYKFFDEESYKKFEKICYGFGIDLSENSEINKPENESIRNYISHFYIVRNPFADYSIAEQIDRVSNLLSYSTRYNNSTYASVFEVFKKDVNLDYDELKKKFKLIGNNDILERLMKPKKVSVLELESYNSDYIKNLIIELLTKIENTNDTL

SEQ ID NO: 191 - protein, 1221 aa, Bergeyella zoohelcum
  source 1..1221: note = Bergeyella zoohelcum ATCC 43767
MENKTSLGNNIYYNPFKPQDKSYFAGYFNAAMENTDSVFRELGKRLKGKEYTSENFFDAIFKENISLVEYERYVKLLSDYFPMARLLDKKEVPIKERKENFKKNFKGIIKAVRDLRNFYTHKEHGEVEITDEIFGVLDEMLKSTVLTVKKKKVKTDKTKEILKKSIEKQLDILCQKKLEYLRDTARKIEEKRRNQRERGEKELVAPFKYSDKRDDLIAAIYNDAFDVYIDKKKDSLKESSKAKYNTKSDPQQEEGDLKIPISKNGVVFLLSLFLTKQEIHAFKSKIAGFKATVIDEATVSEATVSHGKNSICFMATHEIFSHLAYKKLKRKVRTAEINYGEAENAEQLSVYAKETLMMQMLDELSKVPDVVYQNLSEDVQKTFIEDWNEYLKENNGDVGTMEEEQVIHPVIRKRYEDKFNYFAIRFLDEFAQFPTLRFQVHLGNYLHDSRPKENLISDRRIKEKITVFGRLSELEHKKALFIKNTETNEDREHYWEIFPNPNYDFPKENISVNDKDFPIAGSILDREKQPVAGKIGIKVKLLNQQYVSEVDKAVKAHQLKQRKASKPSIQNIIEEIVPINESNPKEAIVFGGQPTAYLSMNDIHSILYEFFDKWEKKKEKLEKKGEKELRKEIGKELEKKIVGKIQAQIQQIIDKDTNAKILKPYQDGNSTAIDKEKLIKDLKQEQNILQKLKDEQTVREKEYNDFIAYQDKNREINKVRDRNHKQYLKDNLKRKYPEAPARKEVLYYREKGKVAVWLANDIKRFMPTDFKNEWKGEQHSLLQKSLAYYEQCKEELKNLLPEKVFQHLPFKLGGYFQQKYLYQFYTCYLDKRLEYISGLVQQAENFKSENKVFKKVENECFKFLKKQNYTHKELDARVQSILGYPIFLERGFMDEKPTIIKGKTFKGNEALFADWFRYYKEYQNFQTFYDTENYPLVELEKKQADRKRKTKIYQQKKNDVFTLLMAKHIFKSVFKQDSIDQFSLEDLYQSREERLGNQERARQTGERNTNYIWNKTVDLKLCDGKITVENVKLKNVGDFIKYEYDQRVQAFLKYEENIEWQAFLIKESKEEENYPYVVEREIEQYEKVRREELLKEVHLIEEYILEKVKDKEILKKGDNQNFKYYILNGLLKQLKNEDVESYKVFNLNTEPEDVNINQLKQEATDLEQKAFVLTYIRNKFAHNQLPKKEFWDYCQEKYGKEKTYAEYFAEVFKKEKEALIK

SEQ ID NO: 192 - DNA, 21 bp, synthetic construct
  misc_feature 1..21: note = GAPDH F primer
  source 1..21: mol_type = other DNA
cagcctcaagatcatcagcaa

SEQ ID NO: 193 - DNA, 20 bp, synthetic construct
  misc_feature 1..20: note = GAPDH R primer
  source 1..20: mol_type = other DNA
tgtggtcatgagtccttcca

SEQ ID NO: 194 - DNA, 20 bp, synthetic construct
  misc_feature 1..20: note = NS5 F primer
  source 1..20: mol_type = other DNA
gaggagagtgccagagttgt

SEQ ID NO: 195 - DNA, 20 bp, synthetic construct
  misc_feature 1..20: note = NS5 R primer
  source 1..20: mol_type = other DNA
tctctctccccatccagtga

SEQ ID NO: 196 - DNA, 23 bp, synthetic construct
  misc_feature 1..23: note = NS5-targeting spacer 1
  source 1..23: mol_type = other DNA
gcaatgatcttcatgttgggagc

SEQ ID NO: 197 - DNA, 22 bp, synthetic construct
  misc_feature 1..22: note = NS5-targeting spacer 2
  source 1..22: mol_type = other DNA
gaaccttgttgatgaactcttc

SEQ ID NO: 198 - DNA, 22 bp, synthetic construct
  misc_feature 1..22: note = NS5-targeting spacer 3
  source 1..22: mol_type = other DNA
gttggtgattagagcttcattc

SEQ ID NO: 199 - DNA, 23 bp, synthetic construct
  misc_feature 1..23: note = NS5-targeting spacer 4
  source 1..23: mol_type = other DNA
gagtgatcctcgttcaagaatcc

SEQ ID NO: 200 - DNA, 20 bp, synthetic construct
  misc_feature 1..20: note = Non-targeting control spacer (lambda2)
  source 1..20: mol_type = other DNA
gtgataagtggaatgccatg

SEQ ID NO: 201 - RNA, 114 nt, synthetic construct
  misc_feature 1..114: note = sgRNA scaffold
  misc_feature 2..21: note = n is a, c, g, or u
  source 1..114: mol_type = other RNA
gnnnnnnnnnnnnnnnnnnnngtttaagagctatgctggaaacagcatagcaagtttaaataaggctagtccgttatcaacttgaaaaagtggcaccgagtcggtgcttttttt

SEQ ID NO: 202 - DNA, 4991 bp, synthetic construct
  misc_feature 1..4991: note = E43-CjeCas9 and sgRNA plasmid
  misc_feature 297..315: note = n is a, c, g, t or u
  source 1..4991: mol_type = other DNA
gtttattacagggacagcagagatccagtttggttaattaaggtaccgagggcctatttcccatgattccttcatatttgcatatacgatacaaggctgttagagagataattagaattaatttgactgtaaacacaaagatattagtacaaaatacgtgacgtagaaagtaataatttcttgggtagtttgcagttttaaaattatgttttaaaatggactatcatatgcttaccgtaacttgaaagtatttcgatttcttggctttatatatcttgtggaaaggacgaaacaccnnnnnnnnnnnnnnnnnnngttttagtccctgaagggactaaaataaagagtttgcgggactctgcggggttacaatcccctaaaaccgctttttttcctgcagcccgggggatccactagttctagagcggccgccaccgcggtggagctccagcttttgttccctttagtgagggttaattgcgcgaattcgctagctaggtcttgaaaggagtgggaattggctccggtgcccgtcagtgggcagagcgcacatcgcccacagtccccgagaagttggggggaggggtcggcaattgatccggtgcctagagaaggtggcgcggggtaaactgggaaagtgatgtcgtgtactggctccgcctttttcccgagggtgggggagaaccgtatataagtgcagtagtcgccgtgaacgttctttttcgcaacgggtttgccgccagaacacaggaccggttctagagcgctatttagaaccatgtgttctccccaagaatctggcatgaccgctctttcagcgaggatgttgacgcgaagcagatccctgggacctggggccgggccacgagggtgtcgggaagaaccaggaccgttgcgacggagggaagcagcagcggaagctcggaaatcccattctccggttaaacgaccccgcaaggcacaacggctcagggttgcttacgaggggagcgattccgaaaagggtgaaggagcagagcccttgaaggttccagtatgggaaccccaggattggcagcagcagcttgtaaacatccgagcaatgaggaacaaaaaagatgcacctgttgatcacctcggaaccgaacattgttatgattctagtgcgccgccaaaagtccgccggtatcaggttctgttgagtttgatgctgagtagtcagactaaggaccaggttacggccggagcaatgcaacggcttcgggcacggggactcacggtcgatagcattttgcagaccgatgacgcaacattgggtaaactcatatatccagttggcttctggcggagcaaagtgaagtacatcaagcagacctcagccattctccaacaacattacggaggtgatatacccgcaagcgtagctgaactggtagcactgccgggcgtcggtcccaaaatggcacatctggctatggcggttgcttggggaacggtgtctggtatcgcagttgatacgcatgtccaccgcatcgccaatcggctgaggtggactaaaaaagccactaagtctcctgaagaaacacgggctgctctggaagagtggcttccacgagagctgtggcatgaaatcaatggattgctggttggtttcgggcagcagacatgcttgcccgtgcacccccggtgtcatgcttgcttgaaccaggctttgtgcccagctgcccagggcctgagtggaagtgagacaccgggaacatctgagtctgcgaccccggagagcacaaacgcgcgaatcctggccttcgcgattggcattagcagcatcggctgggcattctctgaaaacgacgaactgaaggattgcggcgtgcgaattttcactaaggtcgaaaatcccaaaactggtgaatcactcgctctccctagacgactggcacgctccgcacgaaagaggcttgcccgccgcaaggcacgcttgaaccatcttaaacaccttattgcaaatgagtttaaactgaattatgaggactaccaatcctttgacgagtctcttgctaaagcctacaaagggagccttatatccccgtatgagctccggttcagagcactcaacgaactgctgtccaaacaggattttgctcgcgtgattctccacatagcgaagaggcgaggatacgatgacattaaaaacagtgatgataaggaaaaaggggccatactcaaagcgattaagcaaaatgaagagaagctcgctaactatcaatcagtaggggagtatctctataaagagtacttccagaagttcaaagaaaatagcaaggaatttactaatgtccggaataaaaaggagtcttacgaaagatgtattgcgcaatctttcctcaaggacgagctcaaattgattttcaagaaacaaagggaatttgggttcagcttctcaaaaaaatttgaggaagaggttctgagcgttgccttttacaaacgcgcccttaaggacttctcacatctcgtagggaattgtagtttcttcaccgatgaaaaacgggcgccaaaaaatagccctttggcttttatgtttgtcgctctgactcgcatcattaatctgctcaacaaccttaaaaacacggaagggattctgtacacaaaggatgatctgaacgctctgcttaacgaagttttgaagaacgggactttgacctacaaacaaaccaaaaagcttcttggtctcagtgatgactacgaattcaagggagaaaaagggacatatttcatcgaattcaagaagtataaggagttcatcaaagccttgggcgagcacaacttgtctcaagatgatctcaacgaaattgctaaggatatcactctgattaaagacgagatcaagctcaaaaaggcgttggcgaagtatgaccttaaccaaaaccaaatagatagcctcagcaagttggaatttaaagatcacttgaatataagtttcaaggcccttaagttggtcacccccttgatgcttgaaggaaagaaatatgatgaggcatgtaatgagctgaatctcaaggttgctattaacgaagacaaaaaagatttcctcccagctttcaatgagacttactataaggacgaggttaccaatcctgtggtgctccgagccatcaaagagtatcgaaaggtcctgaatgctttgctcaaaaaatacggtaaggtacacaaaataaatattgagctcgcaagggaggtcggtaagaaccactcccagcgcgccaaaatagaaaaggaacagaatgaaaattacaaagcgaaaaaggacgccgagctcgagtgcgaaaagctgggcctgaaaataaacagcaagaacattctcaaactccgcctcttcaaagaacaaaaagaattttgtgcttatagtggtgagaaaataaaaatctccgatcttcaagacgagaagatgctcgaaatagacgcgatatatccatatagcaggtcttttgacgattcttacatgaataaagtgcttgttttcactaagcagaatcaggaaaagttgaatcagaccccctttgaggcctttggcaacgactcagcaaagtggcagaagatcgaggtcttggctaagaatcttcctactaagaaacagaaaaggatattggataagaactataaagacaaagaacaaaagaactttaaagaccgcaacctcaatgacaccagatacatagcaagattggttctgaactacacaaaagattatttggacttcttgccgctgtctgatgatgagaacacgaaactcaacgacacgcaaaaggggtctaaagtccacgtcgaagctaaatctgggatgctcacctcagcattgaggcatacgtggggattctcagcaaaggaccgaaacaatcacctgcaccatgccattgacgcagttatcatagcgtatgccaataattcaatagtaaaagcgtttagcgacttcaagaaggaacaagagtccaacagcgccgagctctacgcaaaaaagattagtgaactcgactacaaaaacaaaagaaaattctttgagccgttcagcggatttcgacagaaggtattggataaaatagatgaaattttcgtgagcaaacccgaaaggaaaaagccctcaggcgccttgcacgaagagactttcaggaaggaagaggaattctaccaaagctacggcggaaaagagggagttttgaaggctctcgaacttggaaagattaggaaggtgaacggcaagatagtgaaaaacggcgatatgttccgggttgatatcttcaaacataaaaaaacgaataaattttatgctgtgcctatatacactatggacttcgcacttaaggtcctgccgaataaggcggtagcccgatctaaaaaaggcgaaattaaggactggattttgatggatgaaaattacgagttctgcttttctctctacaaggattcccttatattgatacagacgaaagatatgcaggaaccggaattcgtgtattacaacgcttttacttcctctacggtatctttgattgtctccaaacatgacaacaaattcgaaacactcagtaaaaaccaaaagattctctttaaaaatgcgaacgagaaagaagtaattgcaaaatcaattggcatccaaaatttgaaagtttttgaaaaatatatagtatctgccctcggagaggttactaaagcggaatttagacagcgagaggacttcaaaaaatcaggtccacccaagaaaaaacgcaaggtggaagatccgaagaaaaagcgaaaagtggatgtgtaacgttttccgggacgccggctggatgatcctccagcgcggggatctcatgctggagttcttcgcccaccccaacttgtttattgcagcttataatggttacaaataaagcaatagcatcacaaatttcacaaataaagcatttttttcactgcattctagttgtggtttgtccaaactcatcaatgtatcttatcatgtctgtataccg

SEQ ID NO: 203 - DNA, 5270 bp, synthetic construct
  misc_feature 1..5270: note = E67-CjeCas9 and sgRNA plasmid
  misc_feature 297..315: note = n is a, c, g, t or u
  source 1..5270: mol_type = other DNA
gtttattacagggacagcagagatccagtttggttaattaaggtaccgagggcctatttcccatgattccttcatatttgcatatacgatacaaggctgttagagagataattagaattaatttgactgtaaacacaaagatattagtacaaaatacgtgacgtagaaagtaataatttcttgggtagtttgcagttttaaaattatgttttaaaatggactatcatatgcttaccgtaacttgaaagtatttcgatttcttggctttatatatcttgtggaaaggacgaaacaccnnnnnnnnnnnnnnnnnnngttttagtccctgaagggactaaaataaagagtttgcgggactctgcggggttacaatcccctaaaaccgctttttttcctgcagcccgggggatccactagttctagagcggccgccaccgcggtggagctccagcttttgttccctttagtgagggttaattgcgcgaattcgctagctaggtcttgaaaggagtgggaattggctccggtgcccgtcagtgggcagagcgcacatcgcccacagtccccgagaagttggggggaggggtcggcaattgatccggtgcctagagaaggtggcgcggggtaaactgggaaagtgatgtcgtgtactggctccgcctttttcccgagggtgggggagaaccgtatataagtgcagtagtcgccgtgaacgttctttttcgcaacgggtttgccgccagaacacaggaccggttctagagcgctatttagaaccatgcaggaggtaatagcggggcttgagcgatttacctttgccttcgaaaaagacgtagagatgcagaagggaaccggcctgctcccatttcaaggtatggacaaatcagcatctgccgtgtgcaattttttcaccaagggtctgtgtgaaaaggggaagctctgtccatttcgccatgatcgcggagagaagatggtggtgtgtaagcactggctgagagggctttgcaaaaaaggcgaccactgcaaatttcttcaccaatatgacctgactcgaatgcctgagtgttatttttacagtaagttcggtgactgtagcaacaaagaatgcagcttcttgcatgtcaaaccagcattcaagtcacaggattgcccgtggtacgatcagggtttttgcaaggacggtcccctctgcaaatatcgacacgtacccagaattatgtgccttaattacctggtcggcttctgtcctgaagggccaaaatgtcagtttgctcaaaaaattcgcgagttcaaattgctccctgggtctaaaatttgggaaccccaggattggcagcagcagcttgtaaacatccgagcaatgaggaacaaaaaagatgcacctgttgatcacctcggaaccgaacattgttatgattctagtgcgccgccaaaagtccgccggtatcaggttctgttgagtttgatgctgagtagtcagactaaggaccaggttacggccggagcaatgcaacggcttcgggcacggggactcacggtcgatagcattttgcagaccgatgacgcaacattgggtaaactcatatatccagttggcttctggcggagcaaagtgaagtacatcaagcagacctcagccattctccaacaacattacggaggtgatatacccgcaagcgtagctgaactggtagcactgccgggcgtcggtcccaaaatggcacatctggctatggcggttgcttggggaacggtgtctggtatcgcagttgatacgcatgtccaccgcatcgccaatcggctgaggtggactaaaaaagccactaagtctcctgaagaaacacgggctgctctggaagagtggcttccacgagagctgtggcatgaaatcaatggattgctggttggtttcgggcagcagacatgcttgcccgtgcacccccggtgtcatgcttgcttgaaccaggctttgtgcccagctgcccagggcctgagtggaagtgagacaccgggaacatctgagtctgcgaccccggagagcacaaacgcgcgaatcctggccttcgcgattggcattagcagcatcggctgggcattctctgaaaacgacgaactgaaggattgcggcgtgcgaattttcactaaggtcgaaaatcccaaaactggtgaatcactcgctctccctagacgactggcacgctccgcacgaaagaggcttgcccgccgcaaggcacgcttgaaccatcttaaacaccttattgcaaatgagtttaaactgaattatgaggactaccaatcctttgacgagtctcttgctaaagcctacaaagggagccttatatccccgtatgagctccggttcagagcactcaacgaactgctgtccaaacaggattttgctcgcgtgattctccacatagcgaagaggcgaggatacgatgacattaaaaacagtgatgataaggaaaaaggggccatactcaaagcgattaagcaaaatgaagagaagctcgctaactatcaatcagtaggggagtatctctataaagagtacttccagaagttcaaagaaaatagcaaggaatttactaatgtccggaataaaaaggagtcttacgaaagatgtattgcgcaatctttcctcaaggacgagctcaaattgattttcaagaaacaaagggaatttgggttcagcttctcaaaaaaatttgaggaagaggttctgagcgttgccttttacaaacgcgcccttaaggacttctcacatctcgtagggaattgtagtttcttcaccgatgaaaaacgggcgccaaaaaatagccctttggcttttatgtttgtcgctctgactcgcatcattaatctgctcaacaaccttaaaaacacggaagggattctgtacacaaaggatgatctgaacgctctgcttaacgaagttttgaagaacgggactttgacctacaaacaaaccaaaaagcttcttggtctcagtgatgactacgaattcaagggagaaaaagggacatatttcatcgaattcaagaagtataaggagttcatcaaagccttgggcgagcacaacttgtctcaagatgatctcaacgaaattgctaaggatatcactctgattaaagacgagatcaagctcaaaaaggcgttggcgaagtatgaccttaaccaaaaccaaatagatagcctcagcaagttggaatttaaagatcacttgaatataagtttcaaggcccttaagttggtcacccccttgatgcttgaaggaaagaaatatgatgaggcatgtaatgagctgaatctcaaggttgctattaacgaagacaaaaaagatttcctcccagctttcaatgagacttactataaggacgaggttaccaatcctgtggtgctccgagccatcaaagagtatcgaaaggtcctgaatgctttgctcaaaaaatacggtaaggtacacaaaataaatattgagctcgcaagggaggtcggtaagaaccactcccagcgcgccaaaatagaaaaggaacagaatgaaaattacaaagcgaaaaaggacgccgagctcgagtgcgaaaagctgggcctgaaaataaacagcaagaacattctcaaactccgcctcttcaaagaacaaaaagaattttgtgcttatagtggtgagaaaataaaaatctccgatcttcaagacgagaagatgctcgaaatagacgcgatatatccatatagcaggtcttttgacgattcttacatgaataaagtgcttgttttcactaagcagaatcaggaaaagttgaatcagaccccctttgaggcctttggcaacgactcagcaaagtggcagaagatcgaggtcttggctaagaatcttcctactaagaaacagaaaaggatattggataagaactataaagacaaagaacaaaagaactttaaagaccgcaacctcaatgacaccagatacatagcaagattggttctgaactacacaaaagattatttggacttcttgccgctgtctgatgatgagaacacgaaactcaacgacacgcaaaaggggtctaaagtccacgtcgaagctaaatctgggatgctcacctcagcattgaggcatacgtggggattctcagcaaaggaccgaaacaatcacctgcaccatgccattgacgcagttatcatagcgtatgccaataattcaatagtaaaagcgtttagcgacttcaagaaggaacaagagtccaacagcgccgagctctacgcaaaaaagattagtgaactcgactacaaaaacaaaagaaaattctttgagccgttcagcggatttcgacagaaggtattggataaaatagatgaaattttcgtgagcaaacccgaaaggaaaaagccctcaggcgccttgcacgaagagactttcaggaaggaagaggaattctaccaaagctacggcggaaaagagggagttttgaaggctctcgaacttggaaagattaggaaggtgaacggcaagatagtgaaaaacggcgatatgttccgggttgatatcttcaaacataaaaaaacgaataaattttatgctgtgcctatatacactatggacttcgcacttaaggtcctgccgaataaggcggtagcccgatctaaaaaaggcgaaattaaggactggattttgatggatgaaaattacgagttctgcttttctctctacaaggattcccttatattgatacagacgaaagatatgcaggaaccggaattcgtgtattacaacgcttttacttcctctacggtatctttgattgtctccaaacatgacaacaaattcgaaacactcagtaaaaaccaaaagattctctttaaaaatgcgaacgagaaagaagtaattgcaaaatcaattggcatccaaaatttgaaagtttttgaaaaatatatagtatctgccctcggagaggttactaaagcggaatttagacagcgagaggacttcaaaaaatcaggtccacccaagaaaaaacgcaaggtggaagatccgaagaaaaagcgaaaagtggatgtgtaacgttttccgggacgccggctggatgatcctccagcgcggggatctcatgctggagttcttcgcccaccccaacttgtttattgcagcttataatggttacaaataaagcaatagcatcacaaatttcacaaataaagcatttttttcactgcattctagttgtggtttgtccaaactcatcaatgtatcttatcatgtctgtataccg

SEQ ID NO: 204 - protein, 137 aa, unidentified
  REGION 1..137: note = RNAseK
MGWLRPGPRPLCPPARASWAFSHRFPSPLAPRRSPTPFFMASLLCCGPKLAACGIVLSAWGVIMLIMLGIFFNVHSAVLIEDVPFTEKDFENGPQNIYNLYEQVSYNCFIAAGLYLLLGGFSFCQVRLNKRKEYMVR

SEQ ID NO: 205 - protein, 1245 aa, unidentified
  REGION 1..1245: note = TALEN
MRIGKSSGWLNESVSLEYEHVSPPTRPRDTRRRPRAAGDGGLAHLHRRLAVGYAEDTPRTEARSPAPRRPLPVAPASAPPAPSLVPEPPMPVSLPAVSSPRFSAGSSAAITDPFPSLPPTPVLYAMARELEALSDATWQPAVPLPAEPPTDARRGNTVFDEASASSPVIASACPQAFASPPRAPRSARARRARTGGDAWPAPTFLSRPSSSRIGRDVFGKLVALGYSREQIRKLKQESLSEIAKYHTTLTGQGFTHADICRISRRRQSLRVVARNYPELAAALPELTRAHIVDIARQRSGDLALQALLPVATALTAAPLRLSASQIATVAQYGERPAIQALYRLRRKLTRAPLHLTPQQVVAIASNTGGKRALEAVCVQLPVLRAAPYRLSTEQVVAIASNKGGKQALEAVKAHLLDLLGAPYVLDTEQVVAIASHNGGKQALEAVKADLLDLRGAPYALSTEQVVAIASHNGGKQALEAVKADLLELRGAPYALSTEQVVAIASHNGGKQALEAVKAHLLDLRGVPYALSTEQVVAIASHNGGKQALEAVKAQLLDLRGAPYALSTAQVVAIASNGGGKQALEGIGEQLLKLRTAPYGLSTEQVVAIASHDGGKQALEAVGAQLVALRAAPYALSTEQVVAIASNKGGKQALEAVKAQLLELRGAPYALSTAQVVAIASHDGGNQALEAVGTQLVALRAAPYALSTEQVVAIASHDGGKQALEAVGAQLVALRAAPYALNTEQVVAIASSHGGKQALEAVRALFPDLRAAPYALSTAQLVAIASNPGGKQALEAVRALFRELRAAPYALSTEQVVAIASNHGGKQALEAVRALFRGLRAAPYGLSTAQVVAIASSNGGKQALEAVWALLPVLRATPYDLNTAQIVAIASHDGGKPALEAVWAKLPVLRGAPYALSTAQVVAIACISGQQALEAIEAHMPTLRQASHSLSPERVAAIACIGGRSAVEAVRQGLPVKAIRRIRREKAPVAGPPPASLGPTPQELVAVLHFFRAHQQPRQAFVDALAAFQATRPALLRLLSSVGVTEIEALGGTIPDATERWQRLLGRLGFRPATGAAAPSPDSLQGFAQSLERTLGSPGMAGQSACSPHRKRPAETAIAPRSIRRSPNNAGQPSEPWPDQLAWLQRRKRTARSHIRADSAASVPANLHLGTRAQFTPDRLRAEPGPIMQAHTSPASVSFGSHVAFEPGLPDPGTPTSADLASFEAEPFGVGPLDFHLDWLLQILET

SEQ ID NO: 206 - protein, 1373 aa, unidentified
  REGION 1..1373: note = TALEN
MDPIRSRTPSPARELLPGPQPDRVQPTADRGGAPPAGGPLDGLPARRTMSRTRLPSPPAPSPAFSAGSFSDLLRQFDPSLLDTSLLDSMPAVGTPHTAAAPAECDEVQSGLRAADDPPPTVRVAVTAARPPRAKPAPRRRAAQPSDASPAAQVDLRTLGYSQQQQEKIKPKVGSTVAQHHEALVGHGFTHAHIVALSRHPAALGTVAVKYQDMIAALPEATHEDIVGVGKQWSGARALEALLTVAGELRGPPLQLDTGQLVKIAKRGGVTAVEAVHASRNALTGAPLNLTPAQVVAIASNNGGKQALETVQRLLPVLCQAHGLTPAQVVAIASHDGGKQALETMQRLLPVLCQAHGLPPDQVVAIASNIGGKQALETVQRLLPVLCQAHGLTPDQVVAIASHGGGKQALETVQRLLPVLCQAHGLTPDQVVAIASHDGGKQALETVQRLLPVLCQAHGLTPDQVVAIASNGGGKQALETVQRLLPVLCQAHGLTPDQVVAIASNGGKQALETVQRLLPVLCQAHGLTPDQVVAIASHDGGKQALETVQRLLPVLCQTHGLTPAQVVAIASHDGGKQALETVQQLLPVLCQAHGLTPDQVVAIASNIGGKQALATVQRLLPVLCQAHGLTPDQVVAIASNGGGKQALETVQRLLPVLCQAHGLTPDQVVAIASNGGGKQALETVQRLLPVLCQAHGLTQVQVVAIASNIGGKQALETVQRLLPVLCQAHGLTPAQVVAIASHDGGKQALETVQRLLPVLCQAHGLTPDQVVAIASNGGGKQALETVQRLLPVLCQAHGLTQEQVVAIASNNGGKQALETVQRLLPVLCQAHGLTPDQVVAIASNGGGKQALETVQRLLPVLCQAHGLTPAQVVAIASNIGGKQALETVQRLLPVLCQDHGLTLAQVVAIASNIGGKQALETVQRLLPVLCQAHGLTQDQVVAIASNIGGKQALETVQRLLPVLCQDHGLTPDQVVAIASNIGGKQALETVQRLLPVLCQDHGLTLDQVVAIASNGGKQALETVQRLLPVLCQDHGLTPDQVVAIASNSGGKQALETVQRLLPVLCQDHGLTPNQVVAIASNGGKQALESIVAQLSRPDPALAALTNDHLVALACLGGRPAMDAVKKGLPHAPELIRRVNRRIGERTSHRVADYAQVVRVLEFFQCHSHPAYAFDEAMTQFGMSRNGLVQLFRRVGVTELEARGGTLPPASQRWDRILQASGMKRAKPSPTSAQTPDQASLHAFADSLERDLDAPSPMHEGDQTGASSRKRSRSDRAVTGPSAQHSFEVRVPEQRDALHLPLSWRVKRPRTRIGGGLPDPGTPIAADLAASSTVMWEQDAAPFAGAADDFPAFNEEELAWLMELLPQSGSVGGTI

SEQ ID NO: 207 - protein, 1978 aa, unidentified
  REGION 1..1978: note = ZNF638
MSRPRFNPRGDFPLQRPRAPNPSGMRPPGPFMRPGSMGLPRFYPAGRARGIPHRFAGHESYQNMGPQRMNVQVTQHRTDPRLTKEKLDFHEAQQKKGKPHGSRWDDEPHISASVAVKQSSVTQVTEQSPKVQSRYTKESASSILASFGLSNEDLEELSRYPDEQLTPENMPLILRDIRMRKMGRRLPNLPSQSRNKETLGSEAVSSNVIDYGHASKYGYTEDPLEVRIYDPEIPTDEVENEFQSQQNISASVPNPNVICNSMFPVEDVFRQMDFPGESSNNRSFFSVESGTKMSGLHISGGQSVLEPIKSVNQSINQTVSQTMSQSLIPPSMNQQPFSSELISSVSQQERIPHEPVINSSNVHVGSRGSKKNYQSQADIPIRSPFGIVKASWLPKFSHADAQKMKRLPTPSMMNDYYAASPRIFPHLCSLCNVECSHLKDWIQHQNTSTHIESCRQLRQQYPDWNPEILPSRRNEGNRKENETPRRRSHSPSPRRSRRSSSSHRFRRSRSPMHYMYRPRSRSPRICHRFISRYRSRSRSRSPYRIRNPFRGSPKCFRSVSPERMSRRSVRSSDRKKALEDVVQRSGHGTEFNKQKHLEAADKGHSPAQKPKTSSGTKPSVKPTSATKSDSNLGGHSIRCKSKNLEDDTLSECKQVSDKAVSLQRKLRKEQSLHYGSVLLITELPEDGCTEEDVRKLFQPFGKVNDVLIVPYRKEAYLEMEFKEAITAIMKYIETTPLTIKGKSVKICVPGKKKAQNKEVKKKTLESKKVSASTLKRDADASKAVEIVTSTSAAKTGQAKASVAKVNKSTGKSASSVKSVVTVAVKGNKASIKTAKSGGKKSLEAKKTGNVKNKDSNKPVTIPENSEIKTSIEVKATENCAKEAISDAALEATENEPLNKETEEMCVMLVSNLPNKGYSVEEVYDLAKPFGGLKDILILSSHKKAYIEINRKAAESMVKFYTCFPVLMDGNQLSISMAPENMNIKDEEAIFITLVKENDPEANIDTIYDRFVHLDNLPEDGLQCVLCVGLQFGKVDHHVFISNRNKAILQLDSPESAQSMYSFLKQNPQNIGDHMLTCSLSPKIDLPEVQIEHDPELEKESPGLKNSPIDESEVQTATDSPSVKPNELEEESTPSIQTETLVQQEEPCEEEAEKATCDSDFAVETLELETQGEEVKEEIPLVASASVSIEQFTENAEECALNQQMFNSDLEKKGAEIINPKTALLPSDSVFAEERNLKGILEESPSEAEDFISGITQTMVEAVAEVEKNETVSEILPSTCIVTLVPGIPTGDEKTVDKKNISEKKGNMDEKEEKEFNTKETRMDLQIGTEKAEKNEGRMDAEKVEKMAAMKEKPAENTLFKAYPNKGVGQANKPDETSKTSILAVSDVSSSKPSIKAVIVSSPKAKATVSKTENQKSFPKSVPRDQINAEKKLSAKEFGLLKPTSARSGLAESSSKFKPTQSSLTRGGSGRISALQGKLSKLDYRDITKQSQETEARPSIMKRDDSNNKTLAEQNTKNPKSTTGRSSKSKEEPLFPFNLDEFVTVDEVIEEVNPSQAKQNPLKGKRKETLKNVPFSELNLKKKKGKTSTPRGVEGELSFVTLDEIGEEEDAAAHLAQALVTVDEVIDEEELNMEEMVKNSNSLFTLDELIDQDDCISHSEPKDVTVLSVAEEQDLLKQERLVTVDEIGEVEELPLNESADITFATLNTKGNEGDTVRDSIGFISSQVPEDPSTLVTVDEIQDDSSDLHLVTLDEVTEEDEDSLADFNNLKEELNFVTVDEVGEEEDGDNDLKVELAQSKNDHPTDKKGNRKKRAVDTKKTKLESLSQVGPVNENVMEEDLKTMIERHLTAKTPTKRVRIGKTLPSEKAVVTEPAKGEEAFQMSEVDEESGLKDSEPERKRKKTEDSSSGKSVASDVPEELDFLVPKAGFFCPICSLFYSGEKAMTNHCKSTRHKQNTEKFMAKQRKEKEQNEAEERSSR

SEQ ID NO: 208 - protein, 1091 aa, unidentified
  REGION 1..1091: note = PUMBY
MDKSKQMNINNLSNIPEVIDPGITIPIYEEEYENNGESNSQLQQQPQKLGSYRSRAGKFSNTLSNLLPSISAKLHHSKKNSHGKNGAEFSSSNNSSQSTVASKTPRASPSRSKMMESSIDGVTMDRPGSLTPPQDMEKLVHFPDSSNNFLIPAPRGSSDSFNLPHQISRTRNNTMSSQITSISSIAPKPRTSSGIWSSNASANDPMQQHLLQQLQPTTSNNTTNSNTLNDYSTKTAYFDNMVSTSGSQMADNKMNTNNLAIPNSVWSNTRQRSQSNASSIYTDAPLYEQPARASISSHYTIPTQESPLIADEIDPQSINWVTMDPTVPSINQISNLLPTNTISISNVFPLQHQQPQLNNAINLTSTSLATLCSKYGEVISARTLRNLNMALVEFSSVESAVKALDSLQGKEVSMIGAPSKISFAKILPMHQQPPQFLLNSQGLPLGLENNNLQPQPLLQEQLFNGAVTFQQQGNVSIPVFNQQSQQSQHQNHSSGSAGFSNVLHGYNNNNSMHGNNNNSANEKEQCPFPLPPPNVNEKEDLLREIIELFEANSDEYQINSLIKKSLNHKGTSDTQNFGPLPEPLSGREFDPPKLRELRKSIDSNAFSDLEIEQLAIAMLDELPELSSDYLGNTIVQKLFEHSSDIIKDIMLRKTSKYLTSMGVHKNGTWACQKMITMAHTPRQIMQVTQGVKDYCTPLINDQFGNYVIQCVLKFGFPWNQFIFESIIANFWVIVQNRYGARAVRACLEAHDIVTPEQSIVLSAMIVTYAEYLSTNSNGALLVTWFLDTSVLPNRHSILAPRLTKRIVELCGHRLASLTILKVLNYRGDDNARKIILDSLFGNVNAHDSSPPKELTKLLCETNYGPTFVHKVLAMPLLEDDLRAHIIKQVRKVLTDSTQIQPSRRLLEEVGLASPSSTHNKTKQQQQQHHNSSISHMFATPDTSGQHMRGLSVSSVKSGGSKHTTMNTTTTNGSSASTLSPGQPLNANSNSSMGYFSYPGVFPVSGFSGNASNGYAMNNDDLSSQFDMLNFNNGTRLSLPQLSLTNHNNTTMELVNNVGSSQPHTNNNNNNNNTNYNDDNTVFETLTLHSAN

SEQ ID NO: 209 - protein, 879 aa, unidentified
  REGION 1..879: note = PUF3
MEMNMDMDMDMELASIVSSLSALSHSNNNGGQAAAAGIVNGGAAGSQQIGGFRRSSFTTANEVDSEILLLHGSSESSPIFKKTALSVGTAPPFSTNSKKFFGNGGNYYQYRSTDTASLSSASYNNYHTHHTAANLGKNNKVNHLLGQYSASIAGPVYYNGNDNNNSGGEGFFEKFGKSLIDGTRELESQDRPDAVNTQSQFISKSVSNASLDTQNTFEQNVESDKNFNKLNRNTTNSGSLYHSSSNSGSSASLESENAHYPKRNIWNVANTPVFRPSNNPAAVGATNVALPNQQDGPANNNFPPYMNGFPPNQFHQGPHYQNFPNYLIGSPSNFISQMISVQIPANEDTEDSNGKKKKKANRPSSVSSPSSPPNNSPFPFAYPNPMMFMPPPPLSAPQQQQQQQQQQQQEDQQQQQQQENPYIYYPTPNPIPVKMPKDEKTFKKRNNKNHPANNSNNANKQANPYLENSIPTKNTSKKNASSKSNESTANNHKSHSHSHPHSQSLQQQQQTYHRSPLLEQLRNSSSDKNSNSNMSLKDIFGHSLEFCKDQHGSRFIQRELATSPASEKEVIFNEIRDDAIELSNDVFGNYVIQKFFEFGSKIQKNTLVDQFKGNMKQLSLQMYACRVIQKALEYIDSNQRIELVLELSDSVLQMIKDQNGNHVIQKAIETIPIEKLPFILSSLTGHIYHLSTHSYGCRVIQRLLEFGSSEDQESILNELKDFIPYLIQDQYGNYVIQYVLQQDQFTNKEMVDIKQEIIETVANNVVEYSKHKFASNVVEKSILYGSKNQKDLIISKILPRDKNHALNLEDDSPMILMIKDQFANYVIQKLVNVSEGEGKKLIVIAIRAYLDKLNKSNSLGNRHLASVEKLAALVENAEV

SEQ ID NO: 210 - protein, 888 aa, unidentified
  REGION 1..888: note = PUF4
MSTKGLKEEIDDVPSVDPVVSETVNSALEQLQLDDPEENATSNAFANKVSQDSQFANGPPSQMFPHPQMMGGMGFMPYSQMMQVPHNPCPFFPPPDFNDPTAPLSSSPLNAGGPPMLFKNDSLPFQMLSSGAAVATQGGQNLNPLINDNSMKVLPIASADPLWTHSNVPGSASVAIEETTATLQESLPSKGRESNNKASSFRRQTFHALSPTDLINAANNVTLSKDFQSDMQNFSKAKKPSVGANNTAKTRTQSISFDNTPSSTSFIPPTNSVSEKLSDFKIETSKEDLINKTAPAKKESPTTYGAAYPYGGPLLQPNPIMPGHPHNISSPIYGIRSPFPNSYEMGAQFQPFSPILNPTSHSLNANSPIPLTQSPIHLAPVLNPSSNSVAFSDMKNDGGKPTTDNDKAGPNVRMDLINPNLGPSMQPFHILPPQQNTPPPPWLYSTPPPFNAMVPPHLLAQNHMPLMNSANNKHHGRNNNSMSSHNDNDNIGNSNYNNKDTGRSNVGKMKNMKNSYHGYYNNNNNNNNNNNNNNNSNATNSNSAEKQRKIEESSRFADAVLDQYIGSIHSLCKDQHGCRFLQKQLDILGSKAADAIFEETKDYTVELMTDSFGNYLIQKLLEEVTTEQRIVLTKISSPHFVEISLNPHGTRALQKLIECIKTDEEAQIVVDSLRPYTVQLSKDLNGNHVIQKCLQRLKPENFQFIFDAISDSCIDIATHRHGCCVLQRCLDHGTTEQCDNLCDKLLALVDKLTLDPFGNYVVQYIITKEAEKNKYDYTHKIVHLLKPRAIELSIHKFGSNVIEKILKTAIVSEPMILEILNNGGETGIQSLLNDSYGNYVLQTALDISHKQNDYLYKRLSEIVAPLLVGPIRNTPHGKRIIGMLHLDS

SEQ ID NO: 211 - protein, 553 aa, unidentified
  REGION 1..553: note = PUF5
MSDSTGRINSKASDSSSISDHQTADLSIFNGSFDGGAFSSSNIPLFNFMGTGNQRFQYSPHPFAKSSDPCRLAALTPSTPKGPLNLTPADFGLADFSVGNESFADFTANNTSFVGNVQSNVRSTRLLPAWAVDNSGNIRDDLTLQDVVSNGSLIDFAMDRTGVKFLERHFPEDHDNEMHFVLFDKLTEQGAVFTSLCRSAAGNFIIQKFVEHATLDEQERLVRKMCDNGLIEMCLDKFACRVVQMSIQKFDVSIAMKLVEKISSLDFLPLCTDQCAIHVLQKVVKLLPISAWSFFVKFLCRDDNLMTVCQDKYGCRLVQQTIDKLSDNPKLHCFNTRLQLLHGLMTSVARNCFRLSSNEFANYVVQYVIKSSGVMEMYRDTIIEKCLLRNILSMSQDKYASHVVEGAFLFAPPLLLSEMMDEIFDGYVKDQETNRDALDILLFHQYGNYVVQQMISICISALLGKEERKMVASEMRLYAKWFDRIKNRVNRHSGRLERFSSGKKIIESLQKLNVPMTMTNEPMPYWAMPTPLMDISAHFMNKLNFQKNSVFDE

SEQ ID NO: 212 - protein, 485 aa, unidentified
  REGION 1..485: note = PUF6
MTPNRRSTDSYNMLGASFDFDPDFSLLSNKTHKNKNPKPPVKLLPYRHGSNTTSSDLDNYIFNSGSGSSDDETPPPAAPIFISLEEVLLNGLLIDFAIDPSGVKFLEANYPLDSEDQIRKAVFEKLTESTTLFVGLCHSRNGNFIVQKLVELATPAEQRELLRQMIDGGLLVMCKDKFACRVVQLALQKFDHSNVFQLIQELSTFDLAAMCTDQISIHVIQRVVKQLPVDMWTFFVHFLSSGDSLMAVCQDKYGCRLVQQVIDRLAENPKLPCFKFRIQLLHSLMTCIVRNCYRLSSNEFANYVIQYVIKSSGIMEMYRDTIIDKCLLRNLLSMSQDKYASHVIEGAFLFAPPALLHEMMEEIFSGYVKDVELNRDALDILLFHQYGNYVVQQMISICTAALIGKEERQLPPAILLLYSGWYEKMKQRVLQHASRLERFSSGKKIIDSVMRHGVPTAAAINAQAAPSLMELTAQFDAMFPSFLAR

SEQ ID NO: 213 - protein, 485 aa, unidentified
  REGION 1..485: note = PUF7
MTPNRRSTDSYNMLGASFDFDPDFSLLSNKTHKNKNPKPPVKLLPYRHGSNTTSSDSDSYIFNSGSGSSDAETPAPVAPIFISLEDVLLNGQLIDFAIDPSGVKFLEANYPLDSEDQIRKAVFEKFTESTTLFVGLCHSRNGNFIVQKLVELATPAEQRELLRQMIDGGLLAMCKDKFACRVVQLALQKFDHSNVFQLIQELSTFDLAAMCTDQISIHVIQRVVKQLPVDMWTFFVHFLSSGDSLMAVCQDKYGCRLVQQVIDRLAENPKLPCFKFRIQLLHSLMTCIVRNCYRLSSNEFANYVIQYVIKSSGIMEMYRDTIIDKCLLRNLLSMSQDKYASHVIEGAFLFAPPALLHEMMEEIFSGYVKDVESNRDALDILLFHQYGNYVVQQMISICTAALIGKEERELPPAILLLYSGWYEKMKQRVLQHASRLERFSSGKKIIDSVMRHGVPTAAAVNAQAAPSLMELTAQFDAMFPSFLAR

SEQ ID NO: 214 - protein, 535 aa, unidentified
  REGION 1..535: note = PUF8
MSRPISIGNTCTFDPSASPIESLGRSIGAQKIVDSVCGSPIRSYGRHISTNPKNERLPDTPEFQFATYMHQGGKVIGQNTLHMFGTPPSCYCAQENIPISSNVGHVLSTINNNYMNHQYNGSNMFSNQMTQMLQAQAYNDLQMHQAHSQSIRVPVQPSATGIFSNPYREPTTTDDLLTRYRANPAMMKNLKLSDIRGALLKFAKDQVGSRFIQQELASSKDRFEKDSIFDEVVSNADELVDDIFGNYVVQKFFEYGEERHWARLVDAIIDRVPEYAFQMYACRVLQKALEKINEPLQIKILSQIRHVIHRCMKDQNGNHVVQKAIEKVSPQYVQFIVDTLLESSNTIYEMSVDPYGCRVVQRCLEHCSPSQTKPVIGQIHKRFDEIANNQYGNYVVQHVIEHGSEEDRMVIVTRVSNNLFEFATHKYSSNVIEKCLEQGAVYHKSMIVGAACHHQEGSVPIVVQMMKDQYANYVVQKMFDQVTSEQRRELILTVRPHIPVLRQFPHGKHILAKLEKYFQKPAVMSYPYQDMQGSH

SEQ ID NO: 215 - protein, 703 aa, unidentified
  REGION 1..703: note = PUF9
MADPNWAYAPPTNYYADHSIAKPIMISGGHPSQDQGHSPKSESFGQSVTTAFNGMVDNLVGSPSSSVQQRNYFTTTPFPISRSPNDRNDDKIMGNGSYGVPIPIPQDGVPQGTPDFQMTPFLQQGGHLIGGSPNGPVQVSGNWYSGGAGIFSTMQQADPSNGMPGMAAEFVNNENGMPGPNGMHQQAMISGSPPFPYQNMMNLTTSFGAMGLGPQQIQQRDPQMFQQPILHEPIQGMAQNGFGQQVFFTQMQNQQHPQGQAQQQLQQLAQQHQQQQNSQQFFGQGPNGMGNGGVMNDWSQRSFGMPQQQAQQNGLPPNFSQNPPRRRGPEDPNGQTPKTLQDIKNNVIEFAKDQHGSRFIQQKLERASLRDKAAIFTPVLENAEELMTDVFGNYVIQKFFEFGNNEQRNQLVGTIRGNVMKLALQMYGCRVIQKALEYVEEKYQHEILGEMEGQVLKCVKDQNGNHVIQKVIERVEPERLQFIIDAFTKNNSDNVYTLSVHPYGCRVIQRVLEYCNEEQKQPVLDALQIHLKQLVLDQYGNYVIQHVIEHGSPSDKEQIVQDVISDDLLKFAQHKFASNVIEKCLTFGGHAERNLIIDKVCGDPNDPSPPLLQMMKDPFANYVVQKMLDVADPQHRKKITLTIKPHIATLRKYNFGKHILLKLEKYFAKQAPANSSNSSSNDQIYEHSPFDIPLGADFSNHPF

SEQ ID NO: 216 - DNA, 1098 bp, Homo sapiens
  source 1..1098: mol_type = genomic DNA
atggccgtcatggcgccccgaaccctcgtcctgctactctcgggggctctggccctgacccagacctgggcgggctctcactccatgaggtatttcttcacatccgtgtcccggcccggccgcggggagccccgcttcatcgcagtgggctacgtggacgacacgcagttcgtgcggttcgacagcgacgccgcgagccagaggatggagccgcgggcgccgtggatagagcaggagggtccggagtattgggacggggagacacggaaagtgaaggcccactcacagactcaccgagtggacctggggaccctgcgcggctactacaaccagagcgaggccggttctcacaccgtccagaggatgtgtggctgcgacgtggggtcggactggcgcttcctccgcgggtaccaccagtacgcctacgacggcaaggattacatcgccctgaaagaggacctgcgctcttggaccgcggcggacatggcagctcagaccaccaagcacaagtgggaggcggcccatgtggcggagcagttgagagcctacctggagggcacgtgcgtggagtggctccgcagatacctggagaacgggaaggagacgctgcagcgcacggacgcccccaaaacgcatatgactcaccacgctgtctctgaccatgaagccaccctgaggtgctgggccctgagcttctaccctgcggagatcacactgacctggcagcgggatggggaggaccagacccaggacacggagctcgtggagaccaggcctgcaggggatggaaccttccagaagtgggcggctgtggtggtgccttctggacaggagcagagataaacctgccatgtgcagcatgagggtttgcccaagcccctcaccctgagatgggagccgtcttcccagcccaccatccccatcgtgggcatcattgctggcctggttctctttggagctgtgatcactggagctgtggtcgctgctgtgatgtggaggaggaagagctcagatagaaaaggagggagctactctcaggctgcaagcagtgacagtgcccagggctctgatgtgtctctcacagcttgtaaagtgtga

SEQ ID NO: 217 - DNA, 3385 bp, Homo sapiens
  source 1..3385: mol_type = genomic DNA
tggtgtaggagaagagggatcaggacgaagtcccaggccccgggcggggctctcagggtctcaggctccgagggccgcgtctgcaatggggaggcgcagcgttggggattccccactcccacgagtttcacttcttctcccaacctatgtcgggtccttcttccaggatactcgtgacgcgtccccatttcccactcccattgggtgtcgggtgtctagagaagccaatcagcgtcgccgtggtcccagttctaaagtccccacgcacccacccggactcagaatctcctcagacgccgagatgcgggtcacggcaccccgaaccgtcctcctgctgctctcggcggccctggccctgaccgagacctgggccggtgagtgcgggtcggcagggaaatggcctctgtggggaggagcgaggggaccgcaggcgggggcgcaggacccggggagccgcgccgggaggagggtcgggcgggtctcagcccctcctcgcccccaggctcccactccatgaggtatttccacaccgccatgtcccggcccggccgcggggagccccgcttcatcaccgtgggctacgtggacgacacgctgttcgtgaggttcgacagcgacgccacgagtccgaggaaggagccgcgggcgccatggatagagcaggaggggccggagtattgggaccgggagacacagatctccaagaccaacacacagacttaccgagagagcctgcggaacctgcgcggctactacaaccagagcgaggccggtgagtgaccccggcccggggcgcaggtcacgactccccatcccccacgtacggcccgggtcgccccgagtctccgggtccgagatccgcccccctgaggccgcgggacccgcccagaccctcgaccggcgagagccccaggcgcgtttacccggtttcattttcagttgaggccaaaatccccgcgggttggtcggggcggggcggggcggggctcgggggacggggctgaccgcggggcctgggccagggtctcacacttggcagaggatgtatggctgcgacctggggcccgacgggcgcctcctccgcgggtataaccagttagcctacgacggcaaggattacatcgccctgaacgaggacctgagctcctggaccgcggcggacaccgcggctcagatcacccagcgcaagtgggaggcggcccgtgtggcggagcaggacagagcctacctggagggcctgtgcgtggagtcgctccgcagatacctggagaacgggaaggagacgctgcagcgcgcgggtaccaggggcagtggggagccttccccatctcctataggtcgccggggatggcctcccacgagaagaggaggaaaatgggatcagcgctagaatgtcgccctcccttgaatggagaatggcatgagttttcctgagtttcctctgagggccccctcttctctctaggacaataaggaatgacgtctctgaggaaatggaggggaagacagtccctagaatactgatcaggggtcccctttgacccctgcagcagccttgggaaccgtgactttcctctcaggccttgttctctgcctcacactcagtgtgtttggggctctgattccagcacttctgagtcactttacctccactcagatcgggagcagaagtccctgttccccgctcagagactcgaactttccaatgaataggagattatcccaggtgcctgcgtccaggctggtgtctgggttctgtgccccttccccaccccaggtgtcctgtccattctcaggctggtcacatgggtggtcctagggtgtcccatgagagatgcaaagcgcctgaattttctgactcttcccatcagaccccccaaagacacatgtgacccaccaccccatctctgaccatgaggccaccctgaggtgctgggccctgggcttctaccctgcggagatcacactgacctggcagcgggatggcgaggaccaaactcaggacaccgagcttgtggagaccagaccagcaggagatagaaccttccagaagtgggcagctgtggtggtgccttctggagaagagcagagatacacatgccatgtacagcatgaggggctgccgaagcccctcaccctgagatggggtaaggagggggatgaggggtcatatctgttctcagggaaagcaggagcccttctggagcccttcagcagggtcagggcccctcatcttcccctcctttcccagagccatcttcccagtccaccatccccatcgtgggcattgttgctggcctggctgtcctagcagttgtggtcatcggagctgtggtcgctactgtgatgtgtaggaggaagagctcaggtagggaaggggtgaggggtggggtctgggttttcttgtcccactgggggtttcaagccccaggtagaagtgttccctgcctcattactgggaagcagcatccacacaggggctaacgcagcctgggaccctgtgtgccagcacttactcttttgtgcagcacatgtgacaatgaaggacggatgtatcgccttgatggttgtggtgttggggtcctgattccagcattcatgagtcaggggaaggtccctgctaaggacagaccttaggagggcagttggtccaggacccacacttgctttcctcgtgtttcctgatcctgccttgggtctgtagtcatacttctggaaattccttttggttccaagacgaggaggttcctctaagatctcatggccctgcttcctcccagtcccctcacaggacattttcttcccacaggtggaaaaggagggagctactctcaggctgcgtgtaagtggtgggggtgggagtgtggaggagctcacccaccccataattcctcctgtcccacgtctcctgagggctctgaccaggtcctgtttttgttctactccagccagcgacagtgcccagggctctgatgtgtctctcacagcttgaaaaggtgagattcttggggtctagagtgggtggggtggcgggtctgggggtgggtggggcagtggggaaaggcctgggtaatggagattctttgattgggatgtttcgcgtgtgtggtgggctgttcagagtgtcatcacttaccatgactaaccagaatttgttcatgactgttgttttctgtagcctgagacagctgtcttgtgagggactgagatgcaggatttcttcacgcctcccctttgtgacttcaagagcctctggcatctctttctgcaaaggcacctgaatgtgtctgcgtccctgttagcataatgtgaggaggtggagagacagcccacccttgtgtccactgtgacccctgttcgcatgctgacctgtgtttcctcccca

SEQ ID NO: 218 - DNA, 1586 bp, Homo sapiens
  source 1..1586: mol_type = genomic DNA
tccgcagtcccggttctaaagtccccagtcacccacccggactcacattctccccagaggccgagatgcgggtcatggcgccccgagccctcctcctgctgctctcgggaggcctggccctgaccgagacctgggcctgctcccactccatgaggtatttcgacaccgccgtgtcccggcccggccgcggagagccccgcttcatctcagtgggctacgtggacgacacgcagttcgtgcggttcgacagcgacgccgcgagtccgagaggggagccgcgggcgccgtgggtggagcaggaggggccggagtattgggaccgggagacacagaagtacaagcgccaggcacaggctgaccgagtgagcctgcggaacctgcgcggctactacaaccagagcgaggacgggtctcacaccctccagaggatgtctggctgcgacctggggcccgacgggcgcctcctccgcgggtatgaccagtccgcctacgacggcaaggattacatcgccctgaacgaggacctgcgctcctggaccgccgcggacaccgcggctcagatcacccagcgcaagttggaggcggcccgtgcggcggagcagctgagagcctacctggagggcacgtgcgtggagtggctccgcagatacctggagaacgggaaggagacgctgcagcgcgcagaacccccaaagacacacgtgacccaccaccccctctctgaccatgaggccaccctgaggtgctgggccctgggcttctaccctgcggagatcacactgacctggcagcgggatggggaggaccagacccaggacaccgagcttgtggagaccaggccagcaggagatggaaccttccagaagtgggcagctgtggtggtgccttctggacaagagcagagatacacgtgccatatgcagcacgaggggctgcaagagcccctcaccctgagctgggagccatcttcccagcccaccatccccatcatgggcatcgttgctggcctggctgtcctggttgtcctagctgtccttggagctgtggtcaccgctatgatgtgtaggaggaagagctcaggtggaaaaggagggagctgctctcaggctgcgtgcagcaacagtgcccagggctctgatgagtctctcatcacttgtaaagcctgagacagctgcctgtgtgggactgagatgcaggatttcttcacacctctcctttgtgacttcaagagcctctggcatctctttctgcaaaggcacctgaatgtgtctgcgttcctgttagcataatgtgaggaggtggagagacagcccacccccgtgtccaccgtgacccctgtccccacactgacctgtgttccctccccgatcatctttcctgttccagagaggtggggctggatgtctccatctctgtctcaaattcatggtgcactgagctgcaacttcttacttccctaatgaagttaagaacctgaatataaatttgtgttctcaaatatttgctatgaagcgttgatggattaattaaataagtcaattcctagaagttgagagagcaaataaagacctgagaaccttccagaa

SEQ ID NO: 219 - DNA, 1586 bp, Homo sapiens
  source 1..1586: mol_type = genomic DNA
tccgcagtcccggttctaaagtccccagtcacccacccggactcacattctccccagaggccgagatgcgggtcatggcgccccgagccctcctcctgctgctctcgggaggcctggccctgaccgagacctgggcctgctcccactccatgaggtatttcgacaccgccgtgtcccggcccggccgcggagagccccgcttcatctcagtgggctacgtggacgacacgcagttcgtgcggttcgacagcgacgccgcgagtccgagaggggagccgcgggcgccgtgggtggagcaggaggggccggagtattgggaccgggagacacagaactacaagcgccaggcacaggctgaccgagtgagcctgcggaacctgcgcggctactacaaccagagcgaggacgggtctcacaccctccagaggatgtatggctgcgacctggggcccgacgggcgcctcctccgcgggtatgaccagtccgcctacgacggcaaggattacatcgccctgaacgaggacctgcgctcctggaccgccgcggacaccgcggctcagatcacccagcgcaagttggaggcggcccgtgcggcggagcagctgagagcctacctggagggcacgtgcgtggagtggctccgcagatacctggagaacgggaaggagacgctgcagcgcgcagaacccccaaagacacacgtgacccaccaccccctctctgaccatgaggccaccctgaggtgctgggccctgggcttctaccctgcggagatcacactgacctggcagcgggatggggaggaccagacccaggacaccgagcttgtggagaccaggccagcaggagatggaaccttccagaagtgggcagctgtggtggtgccttctggacaagagcagagatacacgtgccatatgcagcacgaggggctgcaagagcccctcaccctgagctgggagccatcttcccagcccaccatccccatcatgggcatcgttgctggcctggctgtcctggttgtcctagctgtccttggagctgtggtcaccgctatgatgtgtaggaggaagagctcaggtggaaaaggagggagctgctctcaggctgcgtgcagcaacagtgcccagggctctgatgagtctctcatcacttgtaaagcctgagacagctgcctgtgtgggactgagatgcaggatttcttcacacctctcctttgtgacttcaagagcctctggcatctctttctgcaaaggcgtctgaatgtgtctgcgttcctgttagcataatgtgaggaggtggagagacagcccacccccgtgtccaccgtgacccctgtccccacactgacctgtgttccctccccgatcatctttcctgttccagagaggtggggctggatgtctccatctctgtctcaaattcatggtgcactgagctgcaacttcttacttccctaatgaagttaagaacctgaatataaatttgtgttctcaaatatttgctatgaagcgttgatggattaattaaataagtcaattcctagaagttgagagagcaaataaagacctgagaaccttccagaa

SEQ ID NO: 220 - DNA, 1675 bp, Homo sapiens
  source 1..1675: mol_type = genomic DNA
attcctgaagctgacagcattcgggccgagatgtctcgctccgtggccttagctgtgctcgcgctactctctctttctggcctggaggctatccagcgtactccaaagattcaggtttactcacgtcatccagcagagaatggaaagtcaaatttcctgaattgctatgtgtctgggtttcatccatccgacattgaagttgacttactgaagaatggagagagaattgaaaaagtggagcattcagacttgtctttcagcaaggactggtctttctatctcttgtactacactgaattcacccccactgaaaaagatgagtatgcctgccgtgtgaaccatgtgactttgtcacagcccaagatagttaagtgggatcgagacatgtaagcagcatcatggaggtttgaagatgccgcatttggattggatgaattccaaattctgcttgcttgctttttaatattgatatgcttatacacttacactttatgcacaaaatgtagggttataataatgttaacatggacatgatcttctttataattctactttgagtgctgtctccatgtttgatgtatctgagcaggttgctccacaggtagctctaggagggctggcaacttagaggtggggagcagagaattctcttatccaacatcaacatcttggtcagatttgaactcttcaatctcttgcactcaaagcttgttaagatagttaagcgtgcataagttaacttccaatttacatactctgcttagaatttgggggaaaatttagaaatataattgacaggattattggaaatttgttataatgaatgaaacattttgtcatataagattcatatttacttcttatacatttgataaagtaaggcatggttgtggttaatctggtttatttttgttccacaagttaaataaatcataaaacttgatgtgttatctcttatatctcactcccactattacccctttattttcaaacagggaaacagtcttcaagttccacttggtaaaaaatgtgaaccccttgtatatagagtttggctcacagtgtaaagggcctcagtgattcacattttccagattaggaatctgatgctcaaagaagttaaatggcatagttggggtgacacagctgtctagtgggaggccagccttctatattttagccagcgttctttcctgcgggccaggtcatgaggagtatgcagactctaagagggagcaaaagtatctgaaggatttaatattttagcaaggaatagatatacaatcatcccttggtctccctgggggattggtttcaggaccccttcttggacaccaaatctatggatatttaagtcccttctataaaatggtatagtatttgcatataacctatccacatcctcctgtatactttaaatcatttctagattacttgtaatacctaatacaatgtaaatgctatgcaaatagttgttattgtttaaggaataatgacaagaaaaaaaagtctgtacatgctcagtaaagacacaaccatccctttttttccccagtgtttttgatccatggtttgctgaatccacagatgtggagcccctggatacggaaggcccgctgtactttgaatgacaaataacagatttaaaattttcaaggcatagttttatacctga

SEQ ID NO: 221 - DNA, 4900 bp, Homo sapiens
  source 1..4900: mol_type = genomic DNA
taaagtcatcaaaacaacgttatatcctgtgtgaaatgctgcagtcaggatgccttgtggtttgagtgccttgatcatgtgccctaaggggatggtggcggtggtggtggccgtggatgacggagactctcaggccttggcaggtgcgtctttcagttcccctcacacttcgggttcctcggggaggaggggctggaaccctagcccatcgtcaggacaaagatgctcaggctgctcttggctctcaacttattcccttcaattcaagtaacaggaaacaagattttggtgaagcagtcgcccatgcttgtagcgtacgacaatgcggtcaaccttagctgcaagtattcctacaatctcttctcaagggagttccgggcatcccttcacaaaggactggatagtgctgtggaagtctgtgttgtatatgggaattactcccagcagcttcaggtttactcaaaaacggggttcaactgtgatgggaaattgggcaatgaatcagtgacattctacctccagaatttgtatgttaaccaaacagatatttacttctgcaaaattgaagttatgtatcctcctccttacctagacaatgagaagagcaatggaaccattatccatgtgaaagggaaacacctttgtccaagtcccctatttcccggaccttctaagcccttttgggtgctggtggtggttggtggagtcctggcttgctatagcttgctagtaacagtggcctttattattttctgggtgaggagtaagaggagcaggctcctgcacagtgactacatgaacatgactccccgccgccccgggcccacccgcaagcattaccagccctatgccccaccacgcgacttcgcagcctatcgctcctgacacggacgcctatccagaagccagccggctggcagcccccatctgctcaatatcactgctctggataggaaatgaccgccatctccagccggccacctcaggcccctgttgggccaccaatgccaatttttctcgagtgactagaccaaatatcaagatcattttgagactctgaaatgaagtaaaagagatttcctgtgacaggccaagtcttacagtgccatggcccacattccaacttaccatgtacttagtgacttgactgagaagttagggtagaaaacaaaaagggagtggattctgggagcctcttccctttctcactcacctgcacatctcagtcaagcaaagtgtggtatccacagacattttagttgcagaagaaaggctaggaaatcattccttttggttaaatgggtgtttaatcttttggttagtgggttaaacggggtaagttagagtagggggagggataggaagacatatttaaaaaccattaaaacactgtctcccactcatgaaatgagccacgtagttcctatttaatgctgttttcctttagtttagaaatacatagacattgtcttttatgaattctgatcatatttagtcattttgaccaaatgagggatttggtcaaatgagggattccctcaaagcaatatcaggtaaaccaagttgctttcctcactccctgtcatgagacttcagtgttaatgttcacaatatactttcgaaagaataaaatagttctcctacatgaagaaagaatatgtcaggaaataaggtcactttatgtcaaaattatttgagtactatgggacctggcgcagtggctcatgcttgtaatcccagcactttgggaggccgaggtgggcagatcacttgagatcaggaccagcctggtcaagatggtgaaactccgtctgtactaaaaatacaaaatttagcttggcctggtggcaggcacctgtaatcccagctgcccaagaggctgaggcatgagaatcgcttgaacctggcaggcggaggttgcagtgagccgagatagtgccacagctctccagcctgggcgacagagtgagactccatctcaaacaacaacaacaacaacaacaacaacaacaaaccacaaaattatttgagtactgtgaaggattatttgtctaacagttcattccaatcagaccaggtaggagctttcctgtttcatatgtttcagggttgcacagttggtctctttaatgtcggtgtggagatccaaagtgggttgtggaaagagcgtccataggagaagtgagaatactgtgaaaaagggatgttagcattcattagagtatgaggatgagtcccaagaaggttctttggaaggaggacgaatagaatggagtaatgaaattcttgccatgtgctgaggagatagccagcattaggtgacaatcttccagaagtggtcaggcagaaggtgccctggtgagagctcctttacagggactttatgtggtttagggctcagagctccaaaactctgggctcagctgctcctgtaccttggaggtccattcacatgggaaagtattttggaatgtgtcttttgaagagagcatcagagttcttaagggactgggtaaggcctgaccctgaaatgaccatggatatttttctacctacagtttgagtcaactagaatatgcctggggaccttgaagaatggcccttcagtggccctcaccatttgttcatgcttcagttaattcaggtgttgaaggagcttaggttttagaggcacgtagacttggttcaagtctcgttagtagttgaatagcctcaggcaagtcactgcccacctaagatgatggttcttcaactataaaatggagataatggttacaaatgtctcttcctatagtataatctccataagggcatggcccaagtctgtctttgactctgcctatccctgacatttagtagcatgcccgacatacaatgttagctattggtattattgccatatagataaattatgtataaaaattaaactgggcaatagcctaagaaggggggaatattgtaacacaaatttaaacccactacgcagggatgaggtgctataatatgaggaccttttaacttccatcattttcctgtttcttgaaatagtttatcttgtaatgaaatataaggcacctcccacttttatgtatagaaagaggtcttttaatttttttttaatgtgagaaggaagggaggagtaggaatcttgagattccagatcgaaaatactgtactttggttgatttttaagtgggcttccattccatggatttaatcagtcccaagaagatcaaactcagcagtacttgggtgctgaagaactgttggatttaccctggcacgtgtgccacttgccagcttcttgggcacacagagttcttcaatccaagttatcagattgtatttgaaaatgacagagctggagagttttttgaaatggcagtggcaaataaataaatacttttttttaaatggaaagacttgatctatggtaataaatgattttgttttctgactggaaaaataggcctactaaagatgaatcacacttgagatgtttcttactcactctgcacagaaacaaagaagaaatgttatacagggaagtccgttttcactattagtatgaaccaagaaatggttcaaaaacagtggtaggagcaatgctttcatagtttcagatatggtagttatgaagaaaacaatgtcatttgctgctattattgtaagagtcttataattaatggtactcctataatttttgattgtgagctcacctatttgggttaagcatgccaatttaaagagaccaagtgtatgtacattatgttctacatattcagtgataaaattactaaactactatatgtctgctttaaatttgtactttaatattgtcttttggtattaagaaagatatgctttcagaatagatatgcttcgctttggcaaggaatttggatagaacttgctatttaaaagaggtgtggggtaaatccttgtataaatctccagtttagccttttttgaaaaagctagactttcaaatactaatttcacttcaagcagggtacgtttctggtttgtttgcttgacttcagtcacaatttcttatcagaccaatggctgacctctttgagatgtcaggctaggcttacctatgtgttctgtgtcatgtgaatgctgagaagtttgacagagatccaacttcagccttgaccccatcagtccctcgggttaactaactgagccaccggtcctcatggctattttaatgagggtattgatggttaaatgcatgtctgatcccttatcccagccatttgcactgccagctgggaactataccagacctggatactgatcccaaagtgttaaattcaactacatgctggagattagagatggtgccaataaaggacccagaaccaggatcttgattgctatagacttattaataatccaggtcaaagagagtgacacacactctctcaagacctggggtgagggagtctgtgttatctgcaaggccatttgaggctcagaaagtctctctttcctatagatatatgcatactttctgacatataggaatgtatcaggaatactcaaccatcacaggcatgttcctacctcagggcctttacatgtcctgtttactctgtctagaatgtccttctgtagatgacctggcttgcctcgtcacccttcaggtccttgctcaagtgtcatcttctcccctagttaaactaccccacaccctgtctgctttccttgcttatttttctccatagcattttaccatctcttacattagacatttttcttatttatttgtagtttataagcttcatgaggcaagtaactttgctttgtttcttgctgtatctccagtgcccagagcagtgcctggtatataataaatatttattgactgagtgaaaaaaaaaaaaaaaaa

SEQ ID NO: 222 - DNA, 4609 bp, Homo sapiens
  source 1..4609: mol_type = genomic DNA
taaagtcatcaaaacaacgttatatcctgtgtgaaatgctgcagtcaggatgccttgtggtttgagtgccttgatcatgtgccctaaggggatggtggcggtggtggtggccgtggatgacggagactctcaggccttggcaggtgcgtctttcagttcccctcacacttcgggttcctcggggaggaggggctggaaccctagcccatcgtcaggacaaagatgctcaggctgctcttggctctcaacttattcccttcaattcaagtaacaggaaacaagattttggtgaagcagtcgcccatgcttgtagcgtacgacaatgcggtcaaccttagctggaaacacctttgtccaagtcccctatttcccggaccttctaagcccttttgggtgctggtggtggttggtggagtcctggcttgctatagcttgctagtaacagtggcctttattattttctgggtgaggagtaagaggagcaggctcctgcacagtgactacatgaacatgactccccgccgccccgggcccacccgcaagcattaccagccctatgccccaccacgcgacttcgcagcctatcgctcctgacacggacgcctatccagaagccagccggctggcagcccccatctgctcaatatcactgctctggataggaaatgaccgccatctccagccggccacctcaggcccctgttgggccaccaatgccaatttttctcgagtgactagaccaaatatcaagatcattttgagactctgaaatgaagtaaaagagatttcctgtgacaggccaagtcttacagtgccatggcccacattccaacttaccatgtacttagtgacttgactgagaagttagggtagaaaacaaaaagggagtggattctgggagcctcttccctttctcactcacctgcacatctcagtcaagcaaagtgtggtatccacagacattttagttgcagaagaaaggctaggaaatcattccttttggttaaatgggtgtttaatcttttggttagtgggttaaacggggtaagttagagtagggggagggataggaagacatatttaaaaaccattaaaacactgtctcccactcatgaaatgagccacgtagttcctatttaatgctgttttcctttagtttagaaatacatagacattgtcttttatgaattctgatcatatttagtcattttgaccaaatgagggatttggtcaaatgagggattccctcaaagcaatatcaggtaaaccaagttgctttcctcactccctgtcatgagacttcagtgttaatgttcacaatatactttcgaaagaataaaatagttctcctacatgaagaaagaatatgtcaggaaataaggtcactttatgtcaaaattatttgagtactatgggacctggcgcagtggctcatgcttgtaatcccagcactttgggaggccgaggtgggcagatcacttgagatcaggaccagcctggtcaagatggtgaaactccgtctgtactaaaaatacaaaatttagcttggcctggtggcaggcacctgtaatcccagctgcccaagaggctgaggcatgagaatcgcttgaacctggcaggcggaggttgcagtgagccgagatagtgccacagctctccagcctgggcgacagagtgagactccatctcaaacaacaacaacaacaacaacaacaacaacaaaccacaaaattatttgagtactgtgaaggattatttgtctaacagttcattccaatcagaccaggtaggagctttcctgtttcatatgtttcagggttgcacagttggtctctttaatgtcggtgtggagatccaaagtgggttgtggaaagagcgtccataggagaagtgagaatactgtgaaaaagggatgttagcattcattagagtatgaggatgagtcccaagaaggttctttggaaggaggacgaatagaatggagtaatgaaattcttgccatgtgctgaggagatagccagcattaggtgacaatcttccagaagtggtcaggcagaaggtgccctggtgagagctcctttacagggactttatgtggtttagggctcagagctccaaaactctgggctcagctgctcctgtaccttggaggtccattcacatgggaaagtattttggaatgtgtcttttgaagagagcatcagagttcttaagggactgggtaaggcctgaccctgaaatgaccatggatatttttctacctacagtttgagtcaactagaatatgcctggggaccttgaagaatggcccttcagtggccctcaccatttgttcatgcttcagttaattcaggtgttgaaggagcttaggttttagaggcacgtagacttggttcaagtctcgttagtagttgaatagcctcaggcaagtcactgcccacctaagatgatggttcttcaactataaaatggagataatggttacaaatgtctcttcctatagtataatctccataagggcatggcccaagtctgtctttgactctgcctatccctgacatttagtagcatgcccgacatacaatgttagctattggtattattgccatatagataaattatgtataaaaattaaactgggcaatagcctaagaaggggggaatattgtaacacaaatttaaacccactacgcagggatgaggtgctataatatgaggaccttttaacttccatcattttcctgtttcttgaaatagtttatcttgtaatgaaatataaggcacctcccacttttatgtatagaaagaggtcttttaatttttttttaatgtgagaaggaagggaggagtaggaatcttgagattccagatcgaaaatactgtactttggttgatttttaagtgggcttccattccatggatttaatcagtcccaagaagatcaaactcagcagtacttgggtgctgaagaactgttggatttaccctggcacgtgtgccacttgccagcttcttgggcacacagagttcttcaatccaagttatcagattgtatttgaaaatgacagagctggagagttttttgaaatggcagtggcaaataaataaatacttttttttaaatggaaagacttgatctatggtaataaatgattttgttttctgactggaaaaataggcctactaaagatgaatcacacttgagatgtttcttactcactctgcacagaaacaaagaagaaatgttatacagggaagtccgttttcactattagtatgaaccaagaaatggttcaaaaacagtggtaggagcaatgctttcatagtttcagatatggtagttatgaagaaaacaatgtcatttgctgctattattgtaagagtcttataattaatggtactcctataatttttgattgtgagctcacctatttgggttaagcatgccaatttaaagagaccaagtgtatgtacattatgttctacatattcagtgataaaattactaaactactatatgtctgctttaaatttgtactttaatattgtcttttggtattaagaaagatatgctttcagaatagatatgcttcgctttggcaaggaatttggatagaacttgctatttaaaagaggtgtggggtaaatccttgtataaatctccagtttagccttttttgaaaaagctagactttcaaatactaatttcacttcaagcagggtacgtttctggtttgtttgcttgacttcagtcacaatttcttatcagaccaatggctgacctctttgagatgtcaggctaggcttacctatgtgttctgtgtcatgtgaatgctgagaagtttgacagagatccaacttcagccttgaccccatcagtccctcgggttaactaactgagccaccggtcctcatggctattttaatgagggtattgatggttaaatgcatgtctgatcccttatcccagccatttgcactgccagctgggaactataccagacctggatactgatcccaaagtgttaaattcaactacatgctggagattagagatggtgccaataaaggacccagaaccaggatcttgattgctatagacttattaataatccaggtcaaagagagtgacacacactctctcaagacctggggtgagggagtctgtgttatctgcaaggccatttgaggctcagaaagtctctctttcctatagatatatgcatactttctgacatataggaatgtatcaggaatactcaaccatcacaggcatgttcctacctcagggcctttacatgtcctgtttactctgtctagaatgtccttctgtagatgacctggcttgcctcgtcacccttcaggtccttgctcaagtgtcatcttctcccctagttaaactaccccacaccctgtctgctttccttgcttatttttctccatagcattttaccatctcttacattagacatttttcttatttatttgtagtttataagcttcatgaggcaagtaactttgctttgtttcttgctgtatctccagtgcccagagcagtgcctggtatataataaatatttattgactgagtgaaaaaaaaaaaaaaaaa

SEQ ID NO: 223 - DNA, 4543 bp, Homo sapiens
  source 1..4543: mol_type = genomic DNA
taaagtcatcaaaacaacgttatatcctgtgtgaaatgctgcagtcaggatgccttgtggtttgagtgccttgatcatgtgccctaaggggatggtggcggtggtggtggccgtggatgacggagactctcaggccttggcaggtgcgtctttcagttcccctcacacttcgggttcctcggggaggaggggctggaaccctagcccatcgtcaggacaaagatgctcaggctgctcttggctctcaacttattcccttcaattcaagtaacagggaaacacctttgtccaagtcccctatttcccggaccttctaagcccttttgggtgctggtggtggttggtggagtcctggcttgctatagcttgctagtaacagtggcctttattattttctgggtgaggagtaagaggagcaggctcctgcacagtgactacatgaacatgactccccgccgccccgggcccacccgcaagcattaccagccctatgccccaccacgcgacttcgcagcctatcgctcctgacacggacgcctatccagaagccagccggctggcagcccccatctgctcaatatcactgctctggataggaaatgaccgccatctccagccggccacctcaggcccctgttgggccaccaatgccaatttttctcgagtgactagaccaaatatcaagatcattttgagactctgaaatgaagtaaaagagatttcctgtgacaggccaagtcttacagtgccatggcccacattccaacttaccatgtacttagtgacttgactgagaagttagggtagaaaacaaaaagggagtggattctgggagcctcttccctttctcactcacctgcacatctcagtcaagcaaagtgtggtatccacagacattttagttgcagaagaaaggctaggaaatcattccttttggttaaatgggtgtttaatcttttggttagtgggttaaacggggtaagttagagtagggggagggataggaagacatatttaaaaaccattaaaacactgtctcccactcatgaaatgagccacgtagttcctatttaatgctgttttcctttagtttagaaatacatagacattgtcttttatgaattctgatcatatttagtcattttgaccaaatgagggatttggtcaaatgagggattccctcaaagcaatatcaggtaaaccaagttgctttcctcactccctgtcatgagacttcagtgttaatgttcacaatatactttcgaaagaataaaatagttctcctacatgaagaaagaatatgtcaggaaataaggtcactttatgtcaaaattatttgagtactatgggacctggcgcagtggctcatgcttgtaatcccagcactttgggaggccgaggtgggcagatcacttgagatcaggaccagcctggtcaagatggtgaaactccgtctgtactaaaaatacaaaatttagcttggcctggtggcaggcacctgtaatcccagctgcccaagaggctgaggcatgagaatcgcttgaacctggcaggcggaggttgcagtgagccgagatagtgccacagctctccagcctgggcgacagagtgagactccatctcaaacaacaacaacaacaacaacaacaacaacaaaccacaaaattatttgagtactgtgaaggattatttgtctaacagttcattccaatcagaccaggtaggagctttcctgtttcatatgtttcagggttgcacagttggtctctttaatgtcggtgtggagatccaaagtgggttgtggaaagagcgtccataggagaagtgagaatactgtgaaaaagggatgttagcattcattagagtatgaggatgagtcccaagaaggttctttggaaggaggacgaatagaatggagtaatgaaattcttgccatgtgctgaggagatagccagcattaggtgacaatcttccagaagtggtcaggcagaaggtgccctggtgagagctcctttacagggactttatgtggtttagggctcagagctccaaaactctgggctcagctgctcctgtaccttggaggtccattcacatgggaaagtattttggaatgtgtcttttgaagagagcatcagagttcttaagggactgggtaaggcctgaccctgaaatgaccatggatatttttctacctacagtttgagtcaactagaatatgcctggggaccttgaagaatggcccttcagtggccctcaccatttgttcatgcttcagttaattcaggtgttgaaggagcttaggttttagaggcacgtagacttggttcaagtctcgttagtagttgaatagcctcaggcaagtcactgcccacctaagatgatggttcttcaactataaaatggagataatggttacaaatgtctcttcctatagtataatctccataagggcatggcccaagtctgtctttgactctgcctatccctgacatttagtagcatgcccgacatacaatgttagctattggtattattgccatatagataaattatgtataaaaattaaactgggcaatagcctaagaaggggggaatattgtaacacaaatttaaacccactacgcagggatgaggtgctataatatgaggaccttttaacttccatcattttcctgtttcttgaaatagtttatcttgtaatgaaatataaggcacctcccacttttatgtatagaaagaggtcttttaatttttttttaatgtgagaaggaagggaggagtaggaatcttgagattccagatcgaaaatactgtactttggttgatttttaagtgggcttccattccatggatttaatcagtcccaagaagatcaaactcagcagtacttgggtgctgaagaactgttggatttaccctggcacgtgtgccacttgccagcttcttgggcacacagagttcttcaatccaagttatcagattgtatttgaaaatgacagagctggagagttttttgaaatggcagtggcaaataaataaatacttttttttaaatggaaagacttgatctatggtaataaatgattttgttttctgactggaaaaataggcctactaaagatgaatcacacttgagatgtttcttactcactctgcacagaaacaaagaagaaatgttatacagggaagtccgttttcactattagtatgaaccaagaaatggttcaaaaacagtggtaggagcaatgctttcatagtttcagatatggtagttatgaagaaaacaatgtcatttgctgctattattgtaagagtcttataattaatggtactcctataatttttgattgtgagctcacctatttgggttaagcatgccaatttaaagagaccaagtgtatgtacattatgttctacatattcagtgataaaattactaaactactatatgtctgctttaaatttgtactttaatattgtcttttggtattaagaaagatatgctttcagaatagatatgcttcgctttggcaaggaatttggatagaacttgctatttaaaagaggtgtggggtaaatccttgtataaatctccagtttagccttttttgaaaaagctagactttcaaatactaatttcacttcaagcagggtacgtttctggtttgtttgcttgacttcagtcacaatttcttatcagaccaatggctgacctctttgagatgtcaggctaggcttacctatgtgttctgtgtcatgtgaatgctgagaagtttgacagagatccaacttcagccttgaccccatcagtccctcgggttaactaactgagccaccggtcctcatggctattttaatgagggtattgatggttaaatgcatgtctgatcccttatcccagccatttgcactgccagctgggaactataccagacctggatactgatcccaaagtgttaaattcaactacatgctggagattagagatggtgccaataaaggacccagaaccaggatcttgattgctatagacttattaataatccaggtcaaagagagtgacacacactctctcaagacctggggtgagggagtctgtgttatctgcaaggccatttgaggctcagaaagtctctctttcctatagatatatgcatactttctgacatataggaatgtatcaggaatactcaaccatcacaggcatgttcctacctcagggcctttacatgtcctgtttactctgtctagaatgtccttctgtagatgacctggcttgcctcgtcacccttcaggtccttgctcaagtgtcatcttctcccctagttaaactaccccacaccctgtctgctttccttgcttatttttctccatagcattttaccatctcttacattagacatttttcttatttatttgtagtttataagcttcatgaggcaagtaactttgctttgtttcttgctgtatctccagtgcccagagcagtgcctggtatataataaatatttattgactgagtgaaaaaaaaaaaaaaaaa

SEQ ID NO: 224 - DNA, 2757 bp, Homo sapiens
  source 1..2757: mol_type = genomic DNA
gacaagtactgagtgaactcaaaccctctgtaaagtaacagaagttagaaggggaaatgtcgcctctctgaagattacccaaagaaaaagtgatttgtcattgctttatagactgtaagaagagaacatctcagaagtggagtcttaccctgaaatcaaaggatttaaagaaaaagtggaatttttcttcagcaagctgtgaaactaaatccacaacctttggagacccaggaacaccctccaatctctgtgtgttttgtaaacatcactggagggtcttctacgtgagcaattggattgtcatcagccctgcctgttttgcacctgggaagtgccctggtcttacttgggtccaaattgttggctttcacttttgaccctaagcatctgaagccatgggccacacacggaggcagggaacatcaccatccaagtgtccatacctcaatttctttcagctcttggtgctggctggtctttctcacttctgttcaggtgttatccacgtgaccaaggaagtgaaagaagtggcaacgctgtcctgtggtcacaatgtttctgttgaagagctggcacaaactcgcatctactggcaaaaggagaagaaaatggtgctgactatgatgtctggggacatgaatatatggcccgagtacaagaaccggaccatctttgatatcactaataacctctccattgtgatcctggctctgcgcccatctgacgagggcacatacgagtgtgttgttctgaagtatgaaaaagacgctttcaagcgggaacacctggctgaagtgacgttatcagtcaaagctgacttccctacacctagtatatctgactttgaaattccaacttctaatattagaaggataatttgctcaacctctggaggttttccagagcctcacctctcctggttggaaaatggagaagaattaaatgccatcaacacaacagtttcccaagatcctgaaactgagctctatgctgttagcagcaaactggatttcaatatgacaaccaaccacagcttcatgtgtctcatcaagtatggacatttaagagtgaatcagaccttcaactggaatacaaccaagcaagagcattttcctgataacctgctcccatcctgggccattaccttaatctcagtaaatggaatttttgtgatatgctgcctgacctactgctttgccccaagatgcagagagagaaggaggaatgagagattgagaagggaaagtgtacgccctgtataacagtgtccgcagaagcaaggggctgaaaagatctgaaggtcccacctccatttgcaattgacctcttctgggaacttcctcagatggacaagattaccccaccttgccctttacgtatctgctcttaggtgcttcttcacttcagttgctttgcaggaagtgtctagaggaatatggtgggcacagaagtagctctggtgaccttgatcaaggtgttttgaaatgcagaattcttgagttctggaagggactttagagaataccagtgttattaatgacaaaggcactgaggcccagggaggtgacccgaattataaaggccagcgccagaacccagatttcctaactctggtgctctttccctttatcagtttgactgtggcctgttaactggtatatacatatatatgtcaggcaaagtgctgctggaagtagaatttgtccaataacaggtcaacttcagagactatctgatttcctaatgtcagagtagaagattttatgctgctgtttacaaaagcccaatgtaatgcataggaagtatggcatgaacatctttaggagactaatggaaatattattggtgtttacccagtattccatttttttcattgtgttctctattgctgctctctcactcccccatgaggtacagcagaaaggagaactatccaaaactaatttcctctgacatgtaagacgaatgatttaggtacgtcaaagcagtagtcaaggaggaaagggatagtccaaagacttaactggttcatattggactgataatctctttaaatggctttatgctagtttgacctcatttgtaaaatatttatgagaaagttctcatttaaaatgagatcgttgtttacagtgtatgtactaagcagtaagctatcttcaaatgtctaaggtagtaactttccatagggcctccttagatccctaagatggctttttctccttggtatttctgggtctttctgacatcagcagagaactggaaagacatagccaactgctgttcatgttactcatgactcctttctctaaaactgccttccacaattcactagaccagaagtggacgcaacttaagctgggataatcacattatcatctgaaaatctggagttgaacagcaaaagaagacaacatttctcaaatgcacatctcatggcagctaagccacatggctgggatttaaagcctttagagccagcccatggctttagctacctcactatgctgcttcacaaaccttgctcctgtgtaaaactatattctcagtgtagggcagagaggtctaacaccaacataaggtactagcagtgtttcccgtattgacaggaatacttaactcaataattcttttcttttccatttagtaacagttgtgatgactatgtttctattctaagtaattcctgtattctacagcagatactttgtcagcaatactaagggaagaaacaaagttgaaccgtttctttaataa

SEQ ID NO: 225 - protein, 128 aa, synthetic construct; identical to SEQ ID NO: 121
  REGION 1..128: note = Rnase1 (R39D, N67D, N88A, G89D, R91D, H119N, K41R, D121E)

SEQ ID NO: 226 - DNA, 2735 bp, Homo sapiens
  source 1..2735: mol_type = genomic DNA
agtcattgccgaggaaggcttgcacagggtgaaagctttgcttctctgctgctgtaacagggactagcacagacacacggatgagtggggtcatttccagatattaggtcacagcagaagcagccaaaatggatccccagtgcactatgggactgagtaacattctctttgtgatggccttcctgctctctggtgctgctcctctgaagattcaagcttatttcaatgagactgcagacctgccatgccaatttgcaaactctcaaaaccaaagcctgagtgagctagtagtattttggcaggaccaggaaaacttggttctgaatgaggtatacttaggcaaagagaaatttgacagtgttcattccaagtatatgggccgcacaagttttgattcggacagttggaccctgagacttcacaatcttcagatcaaggacaagggcttgtatcaatgtatcatccatcacaaaaagcccacaggaatgattcgcatccaccagatgaattctgaactgtcagtgcttgctaacttcagtcaacctgaaatagtaccaatttctaatataacagaaaatgtgtacataaatttgacctgctcatctatacacggttacccagaacctaagaagatgagtgttttgctaagaaccaagaattcaactatcgagtatgatggtattatgcagaaatctcaagataatgtcacagaactgtacgacgtttccatcagcttgtctgtttcattccctgatgttacgagcaatatgaccatcttctgtattctggaaactgacaagacgcggcttttatcttcacctttctctatagagcttgaggaccctcagcctcccccagaccacattccttggattacagctgtacttccaacagttattatatgtgtgatggttttctgtctaattctatggaaatggaagaagaagaagcggcctcgcaactcttataaatgtggaaccaacacaatggagagggaagagagtgaacagaccaagaaaagagaaaaaatccatatacctgaaagatctgatgaagcccagcgtgtttttaaaagttcgaagacatcttcatgcgacaaaagtgatacatgtttttaattaaagagtaaagcccatacaagtattcattttttctaccctttcctttgtaagttcctgggcaacctttttgatttcttccagaaggcaaaaagacattaccatgagtaataagggggctccaggactccctctaagtggaatagcctccctgtaactccagctctgctccgtatgccaagaggagactttaattctcttactgcttcttttcacttcagagcacacttatgggccaagcccagcttaatggctcatgacctggaaataaaatttaggaccaatacctcctccagatcagattcttctcttaatttcatagattgtgttttttttttaaatagacctctcaatttctggaaaactgccttttatctgcccagaattctaagctggtgccccactgaattttgtgtacctgtgactaaacaactacctcctcagtctgggtgggacttatgtatttatgaccttatagtgttaatatcttgaaacatagagatctatgtactgtaatagtgtgattactatgctctagagaaaagtctacccctgctaaggagttctcatccctctgtcagggtcagtaaggaaaacggtggcctagggtacaggcaacaatgagcagaccaacctaaatttggggaaattaggagaggcagagatagaacctggagccacttctatctgggctgttgctaatattgaggaggcttgccccacccaacaagccatagtggagagaactgaataaacaggaaaatgccagagcttgtgaaccctgtttctcttgaagaactgactagtgagatggcctggggaagctgtgaaagaaccaaaagagatcacaatactcaaaagagagagagagagaaaaaagagagatcttgatccacagaaatacatgaaatgtctggtctgtccaccccatcaacaagtcttgaaacaagcaacagatggatagtctgtccaaatggacataagacagacagcagtttccctggtggtcagggaggggttttggtgatacccaagttattgggatgtcatcttcctggaagcagagctggggagggagagccatcaccttgataatgggatgaatggaaggaggcttaggactttccactcctggctgagagaggaagagctgcaacggaattaggaagaccaagacacagatcacccggggcttacttagcctacagatgtcctacgggaacgtgggctggcccagcatagggctagcaaatttgagttggatgattgtttttgctcaaggcaaccagaggaaacttgcatacagagacagatatactgggagaaatgactttgaaaacctggctctaaggtgggatcactaagggatggggcagtctctgcccaaacataaagagaactctggggagcctgagccacaaaaatgttcctttattttatgtaaaccctcaagggttatagactgccatgctagacaagcttgtccatgtaatattcccatgtttttaccctgcccctgccttgattagactcctagcacctggctagtttctaacatgttttgtgcagcacagtttttaataaatgcttgttacattcatttaaaaaaaaaaaaaa

SEQ ID NO: 227 - DNA, 2790 bp, Homo sapiens
  source 1..2790: mol_type = genomic DNA
ccctttctgtatttgagttctaccgtcagtcctggcattatttctctctctacaaggagccttaggaggtacggggagctcgcaaatactccttttggtttattcttaccaccttgcttctgtgttccttgggaatgctgctgtgcttatgcatctggtctctttttggagctacagtggacaggcatttgtgacagcactatgggactgagtaacattctctttgtgatggccttcctgctctctggtgctgctcctctgaagattcaagcttatttcaatgagactgcagacctgccatgccaatttgcaaactctcaaaaccaaagcctgagtgagctagtagtattttggcaggaccaggaaaacttggttctgaatgaggtatacttaggcaaagagaaatttgacagtgttcattccaagtatatgggccgcacaagttttgattcggacagttggaccctgagacttcacaatcttcagatcaaggacaagggcttgtatcaatgtatcatccatcacaaaaagcccacaggaatgattcgcatccaccagatgaattctgaactgtcagtgcttgctaacttcagtcaacctgaaatagtaccaatttctaatataacagaaaatgtgtacataaatttgacctgctcatctatacacggttacccagaacctaagaagatgagtgttttgctaagaaccaagaattcaactatcgagtatgatggtattatgcagaaatctcaagataatgtcacagaactgtacgacgtttccatcagcttgtctgtttcattccctgatgttacgagcaatatgaccatcttctgtattctggaaactgacaagacgcggcttttatcttcacctttctctatagagcttgaggaccctcagcctcccccagaccacattccttggattacagctgtacttccaacagttattatatgtgtgatggttttctgtctaattctatggaaatggaagaagaagaagcggcctcgcaactcttataaatgtggaaccaacacaatggagagggaagagagtgaacagaccaagaaaagagaaaaaatccatatacctgaaagatctgatgaagcccagcgtgtttttaaaagttcgaagacatcttcatgcgacaaaagtgatacatgtttttaattaaagagtaaagcccatacaagtattcattttttctaccctttcctttgtaagttcctgggcaacctttttgatttcttccagaaggcaaaaagacattaccatgagtaataagggggctccaggactccctctaagtggaatagcctccctgtaactccagctctgctccgtatgccaagaggagactttaattctcttactgcttcttttcacttcagagcacacttatgggccaagcccagcttaatggctcatgacctggaaataaaatttaggaccaatacctcctccagatcagattcttctcttaatttcatagattgtgttttttttttaaatagacctctcaatttctggaaaactgccttttatctgcccagaattctaagctggtgccccactgaattttgtgtacctgtgactaaacaactacctcctcagtctgggtgggacttatgtatttatgaccttatagtgttaatatcttgaaacatagagatctatgtactgtaatagtgtgattactatgctctagagaaaagtctacccctgctaaggagttctcatccctctgtcagggtcagtaaggaaaacggtggcctagggtacaggcaacaatgagcagaccaacctaaatttggggaaattaggagaggcagagatagaacctggagccacttctatctgggctgttgctaatattgaggaggcttgccccacccaacaagccatagtggagagaactgaataaacaggaaaatgccagagcttgtgaaccctgtttctcttgaagaactgactagtgagatggcctggggaagctgtgaaagaaccaaaagagatcacaatactcaaaagagagagagagagaaaaaagagagatcttgatccacagaaatacatgaaatgtctggtctgtccaccccatcaacaagtcttgaaacaagcaacagatggatagtctgtccaaatggacataagacagacagcagtttccctggtggtcagggaggggttttggtgatacccaagttattgggatgtcatcttcctggaagcagagctggggagggagagccatcaccttgataatgggatgaatggaaggaggcttaggactttccactcctggctgagagaggaagagctgcaacggaattaggaagaccaagacacagatcacccggggcttacttagcctacagatgtcctacgggaacgtgggctggcccagcatagggctagcaaatttgagttggatgattgtttttgctcaaggcaaccagaggaaacttgcatacagagacagatatactgggagaaatgactttgaaaacctggctctaaggtgggatcactaagggatggggcagtctctgcccaaacataaagagaactctggggagcctgagccacaaaaatgttcctttattttatgtaaaccctcaagggttatagactgccatgctagacaagcttgtccatgtaatattcccatgtttttaccctgcccctgccttgattagactcctagcacctggctagtttctaacatgttttgtgcagcacagtttttaataaatgcttgttacattcatttaaaaaaaaaaaaaa

SEQ ID NO: 228 - DNA, 2646 bp, Homo sapiens
  source 1..2646: mol_type = genomic DNA
ccctttctgtatttgagttctaccgtcagtcctggcattatttctctctctacaaggagccttaggaggtacggggagctcgcaaatactccttttggtttattcttaccaccttgcttctgtgttccttgggaatgctgctgtgcttatgcatctggtctctttttggagctacagtggacaggcatttgtgacagcactatgggactgagtaacattctctttgtgatggccttcctgctctctggtgctgctcctctgaagattcaagcttatttcaatgagactgcagacctgccatgccaatttgcaaactctcaaaaccaaagcctgagtgagctagtagtattttggcaggaccaggaaaacttggttctgaatgaggtatacttaggcaaagagaaatttgacagtgttcattccaagtatatgggccgcacaagttttgattcggacagttggaccctgagacttcacaatcttcagatcaaggacaagggcttgtatcaatgtatcatccatcacaaaaagcccacaggaatgattcgcatccaccagatgaattctgaactgtcagtgcttgctaacttcagtcaacctgaaatagtaccaatttctaatataacagaaaatgtgtacataaatttgacctgctcatctatacacggttacccagaacctaagaagatgagtgttttgctaagaaccaagaattcaactatcgagtatgatggtattatgcagaaatctcaagataatgtcacagaactgtacgacgtttccatcagcttgtctgtttcattccctgatgttacgagcaatatgaccatcttctgtattctggaaactgacaagacgcggcttttatcttcacctttctctataggaaccaacacaatggagagggaagagagtgaacagaccaagaaaagagaaaaaatccatatacctgaaagatctgatgaagcccagcgtgtttttaaaagttcgaagacatcttcatgcgacaaaagtgatacatgtttttaattaaagagtaaagcccatacaagtattcattttttctaccctttcctttgtaagttcctgggcaacctttttgatttcttccagaaggcaaaaagacattaccatgagtaataagggggctccaggactccctctaagtggaatagcctccctgtaactccagctctgctccgtatgccaagaggagactttaattctcttactgcttcttttcacttcagagcacacttatgggccaagcccagcttaatggctcatgacctggaaataaaatttaggaccaatacctcctccagatcagattcttctcttaatttcatagattgtgttttttttttaaatagacctctcaatttctggaaaactgccttttatctgcccagaattctaagctggtgccccactgaattttgtgtacctgtgactaaacaactacctcctcagtctgggtgggacttatgtatttatgaccttatagtgttaatatcttgaaacatagagatctatgtactgtaatagtgtgattactatgctctagagaaaagtctacccctgctaaggagttctcatccctctgtcagggtcagtaaggaaaacggtggcctagggtacaggcaacaatgagcagaccaacctaaatttggggaaattaggagaggcagagatagaacctggagccacttctatctgggctgttgctaatattgaggaggcttgccccacccaacaagccatagtggagagaactgaataaacaggaaaatgccagagcttgtgaaccctgtttctcttgaagaactgactagtgagatggcctggggaagctgtgaaagaaccaaaagagatcacaatactcaaaagagagagagagagaaaaaagagagatcttgatccacagaaatacatgaaatgtctggtctgtccaccccatcaacaagtcttgaaacaagcaacagatggatagtctgtccaaatggacataagacagacagcagtttccctggtggtcagggaggggttttggtgatacccaagttattgggatgtcatcttcctggaagcagagctggggagggagagccatcaccttgataatgggatgaatggaaggaggcttaggactttccactcctggctgagagaggaagagctgcaacggaattaggaagaccaagacacagatcacccggggcttacttagcctacagatgtcctacgggaacgtgggctggcccagcatagggctagcaaatttgagttggatgattgtttttgctcaaggcaaccagaggaaacttgcatacagagacagatatactgggagaaatgactttgaaaacctggctctaaggtgggatcactaagggatggggcagtctctgcccaaacataaagagaactctggggagcctgagccacaaaaatgttcctttattttatgtaaaccctcaagggttatagactgccatgctagacaagcttgtccatgtaatattcccatgtttttaccctgcccctgccttgattagactcctagcacctggctagtttctaacatgttttgtgcagcacagtttttaataaatgcttgttacattcatttaaaaaaaaaaaaaa

SEQ ID NO: 229 - DNA, 2399 bp, Homo sapiens
  source 1..2399: mol_type = genomic DNA
agtcattgccgaggaaggcttgcacagggtgaaagctttgcttctctgctgctgtaacagggactagcacagacacacggatgagtggggtcatttccagatattaggtcacagcagaagcagccaaaatggatccccagtgcactatgggactgagtaacattctctttgtgatggccttcctgctctctgctaacttcagtcaacctgaaatagtaccaatttctaatataacagaaaatgtgtacataaatttgacctgctcatctatacacggttacccagaacctaagaagatgagtgttttgctaagaaccaagaattcaactatcgagtatgatggtattatgcagaaatctcaagataatgtcacagaactgtacgacgtttccatcagcttgtctgtttcattccctgatgttacgagcaatatgaccatcttctgtattctggaaactgacaagacgcggcttttatcttcacctttctctatagagcttgaggaccctcagcctcccccagaccacattccttggattacagctgtacttccaacagttattatatgtgtgatggttttctgtctaattctatggaaatggaagaagaagaagcggcctcgcaactcttataaatgtggaaccaacacaatggagagggaagagagtgaacagaccaagaaaagagaaaaaatccatatacctgaaagatctgatgaagcccagcgtgtttttaaaagttcgaagacatcttcatgcgacaaaagtgatacatgtttttaattaaagagtaaagcccatacaagtattcattttttctaccctttcctttgtaagttcctgggcaacctttttgatttcttccagaaggcaaaaagacattaccatgagtaataagggggctccaggactccctctaagtggaatagcctccctgtaactccagctctgctccgtatgccaagaggagactttaattctcttactgcttcttttcacttcagagcacacttatgggccaagcccagcttaatggctcatgacctggaaataaaatttaggaccaatacctcctccagatcagattcttctcttaatttcatagattgtgttttttttttaaatagacctctcaatttctggaaaactgccttttatctgcccagaattctaagctggtgccccactgaattttgtgtacctgtgactaaacaactacctcctcagtctgggtgggacttatgtatttatgaccttatagtgttaatatcttgaaacatagagatctatgtactgtaatagtgtgattactatgctctagagaaaagtctacccctgctaaggagttctcatccctctgtcagggtcagtaaggaaaacggtggcctagggtacaggcaacaatgagcagaccaacctaaatttggggaaattaggagaggcagagatagaacctggagccacttctatctgggctgttgctaatattgaggaggcttgccccacccaacaagccatagtggagagaactgaataaacaggaaaatgccagagcttgtgaaccctgtttctcttgaagaactgactagtgagatggcctggggaagctgtgaaagaaccaaaagagatcacaatactcaaaagagagagagagagaaaaaagagagatcttgatccacagaaatacatgaaatgtctggtctgtccaccccatcaacaagtcttgaaacaagcaacagatggatagtctgtccaaatggacataagacagacagcagtttccctggtggtcagggaggggttttggtgatacccaagttattgggatgtcatcttcctggaagcagagctggggagggagagccatcaccttgataatgggatgaatggaaggaggcttaggactttccactcctggctgagagaggaagagctgcaacggaattaggaagaccaagacacagatcacccggggcttacttagcctacagatgtcctacgggaacgtgggctggcccagcatagggctagcaaatttgagttggatgattgtttttgctcaaggcaaccagaggaaacttgcatacagagacagatatactgggagaaatgactttgaaaacctggctctaaggtgggatcactaagggatggggcagtctctgcccaaacataaagagaactctggggagcctgagccacaaaaatgttcctttattttatgtaaaccctcaagggttatagactgccatgctagacaagcttgtccatgtaatattcccatgtttttaccctgcccctgccttgattagactcctagcacctggctagtttctaacatgttttgtgcagcacagtttttaataaatgcttgttacattcatttaaaaaaaaaaaaaa

SEQ ID NO: 230 - DNA, 2685 bp, Homo sapiens
  source 1..2685: mol_type = genomic DNA
agtcattgccgaggaaggcttgcacagggtgaaagctttgcttctctgctgctgtaacagggactagcacagacacacggatgagtggggtcatttccagatattaggtcacagcagaagcagccaaaatggatccccagtggtgctgctcctctgaagattcaagcttatttcaatgagactgcagacctgccatgccaatttgcaaactctcaaaaccaaagcctgagtgagctagtagtattttggcaggaccaggaaaacttggttctgaatgaggtatacttaggcaaagagaaatttgacagtgttcattccaagtatatgggccgcacaagttttgattcggacagttggaccctgagacttcacaatcttcagatcaaggacaagggcttgtatcaatgtatcatccatcacaaaaagcccacaggaatgattcgcatccaccagatgaattctgaactgtcagtgcttgctaacttcagtcaacctgaaatagtaccaatttctaatataacagaaaatgtgtacataaatttgacctgctcatctatacacggttacccagaacctaagaagatgagtgttttgctaagaaccaagaattcaactatcgagtatgatggtattatgcagaaatctcaagataatgtcacagaactgtacgacgtttccatcagcttgtctgtttcattccctgatgttacgagcaatatgaccatcttctgtattctggaaactgacaagacgcggcttttatcttcacctttctctatagagcttgaggaccctcagcctcccccagaccacattccttggattacagctgtacttccaacagttattatatgtgtgatggttttctgtctaattctatggaaatggaagaagaagaagcggcctcgcaactcttataaatgtggaaccaacacaatggagagggaagagagtgaacagaccaagaaaagagaaaaaatccatatacctgaaagatctgatgaagcccagcgtgtttttaaaagttcgaagacatcttcatgcgacaaaagtgatacatgtttttaattaaagagtaaagcccatacaagtattcattttttctaccctttcctttgtaagttcctgggcaacctttttgatttcttccagaaggcaaaaagacattaccatgagtaataagggggctccaggactccctctaagtggaatagcctccctgtaactccagctctgctccgtatgccaagaggagactttaattctcttactgcttcttttcacttcagagcacacttatgggccaagcccagcttaatggctcatgacctggaaataaaatttaggaccaatacctcctccagatcagattcttctcttaatttcatagattgtgttttttttttaaatagacctctcaatttctggaaaactgccttttatctgcccagaattctaagctggtgccccactgaattttgtgtacctgtgactaaacaactacctcctcagtctgggtgggacttatgtatttatgaccttatagtgttaatatcttgaaacatagagatctatgtactgtaatagtgtgattactatgctctagagaaaagtctacccctgctaaggagttctcatccctctgtcagggtcagtaaggaaaacggtggcctagggtacaggcaacaatgagcagaccaacctaaatttggggaaattaggagaggcagagatagaacctggagccacttctatctgggctgttgctaatattgaggaggcttgccccacccaacaagccatagtggagagaactgaataaacaggaaaatgccagagcttgtgaaccctgtttctcttgaagaactgactagtgagatggcctggggaagctgtgaaagaaccaaaagagatcacaatactcaaaagagagagagagagaaaaaagagagatcttgatccacagaaatacatgaaatgtctggtctgtccaccccatcaacaagtcttgaaacaagcaacagatggatagtctgtccaaatggacataagacagacagcagtttccctggtggtcagggaggggttttggtgatacccaagttattgggatgtcatcttcctggaagcagagctggggagggagagccatcaccttgataatgggatgaatggaaggaggcttaggactttccactcctggctgagagaggaagagctgcaacggaattaggaagaccaagacacagatcacccggggcttacttagcctacagatgtcctacgggaacgtgggctggcccagcatagggctagcaaatttgagttggatgattgtttttgctcaaggcaaccagaggaaacttgcatacagagacagatatactgggagaaatgactttgaaaacctggctctaaggtgggatcactaagggatggggcagtctctgcccaaacataaagagaactctggggagcctgagccacaaaaatgttcctttattttatgtaaaccctcaagggttatagactgccatgctagacaagcttgtccatgtaatattcccatgtttttaccctgcccctgccttgattagactcctagcacctggctagtttctaacatgttttgtgcagcacagtttttaataaatgcttgttacattcatttaaaaaaaaaaaaaa

SEQ ID NO: 231 - DNA, 2025 bp, Homo sapiens
  source 1..2025: mol_type = genomic DNA
agttagagccgatctcccgcgccccgaggttgctcctctccgaggtctcccgcggcccaagttctccgcgccccgaggtctccgcgccccgaggtctccgcggcccgaggtctccgcccgcaccatgcggctgggcagtcctggactgctcttcctgctcttcagcagccttcgagctgatactcaggagaaggaagtcagagcgatggtaggcagcgacgtggagctcagctgcgcttgccctgaaggaagccgttttgatttaaatgatgtttacgtatattggcaaaccagtgagtcgaaaaccgtggtgacctaccacatcccacagaacagctccttggaaaacgtggacagccgctaccggaaccgagccctgatgtcaccggccggcatgctgcggggcgacttctccctgcgcttgttcaacgtcaccccccaggacgagcagaagtttcactgcctggtgttgagccaatccctgggattccaggaggttttgagcgttgaggttacactgcatgtggcagcaaacttcagcgtgcccgtcgtcagcgccccccacagcccctcccaggatgagctcaccttcacgtgtacatccataaacggctaccccaggcccaacgtgtactggatcaataagacggacaacagcctgctggaccaggctctgcagaatgacaccgtcttcttgaacatgcggggcttgtatgacgtggtcagcgtgctgaggatcgcacggacccccagcgtgaacattggctgctgcatagagaacgtgcttctgcagcagaacctgactgtcggcagccagacaggaaatgacatcggagagagagacaagatcacagagaatccagtcagtaccggcgagaaaaacgcggccacgtggagcatcctggctgtcctgtgcctgcttgtggtcgtggcggtggccataggctgggtgtgcagggaccgatgcctccaacacagctatgcaggtgcctgggctgtgagtccggagacagagctcactggtgagtttgccgtgggaagcagcaggttctggggggcccaggggaggcttggctgccagctgtctttcagagtttcaaaaaactttcaaaaggcaaaagtcccttgccttgaacaactgttgttcctggagacgcagcgaagccctcgatggtgcgcatggcatttcctgcagcctccccttggcatgggatggcatcctggtgtgcactttgtcacactgcgatgggattttcccaacatgcacagaagcagagagacgagtgctagacccccgcgctccccagtgcccagccccgaccagggtgtccagggcgggtccaggcaccggcgcccagcccccatggggtgtccggagtgggtccaggcaccggcgcccagcccccgtggggtgtccagggcgggtccaggcaccggcgcccagcccctgtggggtgtccggagtgggtccgggcaccgccagcttctctctgtggcagccactcctgcagctctcgtttgcccctcagttccaggagcaacatagatgtggattcctgtccaatttgggaaaaatgtccacacacggtcacccacctggcaggtgcctctggctgcaaggggcgctgggcttcgcaggcaggccagccgggctccccgccatgggccaggatcccctccgagccctgtttgccgcccaggagaaggggttccccggggacagtgggctcagggtgtgcgcagccaccatgctgtggtgtcacctgtggacccaggcgagctgatggccgaccgcagaaacgcacttccaaggccaggtcggcccatccagatgatgcaggaacacagcttgctaaaaacacggccggcctgttcccgtcggagccagtcgaagttccctgaacaggccgctgtttccgaagctttaaaccctgtgtttccaccaagctgagtcctgagaaaaccgacgtctgcctgcagaagggaaaggggtgcttcatgttcctctctctccttcatctccct

SEQ ID NO: 232 - DNA, 3484 bp, Homo sapiens
  source 1..3484: mol_type = genomic DNA
ggccctgggacctttgcctattttctgattgataggctttgttttgtctttacctccttctttctggggaaaacttcagttttatcgcacgttccccttttccatatcttcatcttccctctacccagattgtgaagatggaaagggtccaacccctggaagagaatgtgggaaatgcagccaggccaagattcgagaggaacaagctattgctggtggcctctgtaattcagggactggggctgctcctgtgcttcacctacatctgcctgcacttctctgctcttcaggtatcacatcggtatcctcgaattcaaagtatcaaagtacaatttaccgaatataagaaggagaaaggtttcatcctcacttcccaaaaggaggatgaaatcatgaaggtgcagaacaactcagtcatcatcaactgtgatgggttttatctcatctccctgaagggctacttctcccaggaagtcaacattagccttcattaccagaaggatgaggagcccctcttccaactgaagaaggtcaggtctgtcaactccttgatggtggcctctctgacttacaaagacaaagtctacttgaatgtgaccactgacaatacctccctggatgacttccatgtgaatggcggagaactgattcttatccatcaaaatcctggtgaattctgtgtcctttgaggggctgatggcaatatctaaaaccaggcaccagcatgaacaccaagctgggggtggacagggcatggattcttcattgcaagtgaaggagcctcccagctcagccacgtgggatgtgacaagaagcagatcctggccctcccgcccccacccctcagggatatttaaaacttattttatataccagttaatcttatttatccttatattttctaaattgcctagccgtcacaccccaagattgccttgagcctactaggcacctttgtgagaaagaaaaaatagatgcctcttcttcaagatgcattgtttctattggtcaggcaattgtcataataaacttatgtcattgaaaacggtacctgactaccatttgctggaaatttgacatgtgtgtggcattatcaaaatgaagaggagcaaggagtgaaggagtggggttatgaatctgccaaaggtggtatgaaccaacccctggaagccaaagcggcctctccaaggttaaattgattgcagtttgcatattgcctaaatttaaactttctcatttggtgggggttcaaaagaagaatcagcttgtgaaaaatcaggacttgaagagagccgtctaagaaataccacgtgctttttttctttaccattttgctttcccagcctccaaacatagttaatagaaatttcccttcaaagaactgtctggggatgtgatgctttgaaaaatctaatcagtgacttaagagagattttcttgtatacagggagagtgagataacttattgtgaagggttagctttactgtacaggatagcagggaactggacatctcagggtaaaagtcagtacggattttaatagcctggggaggaaaacacattctttgccacagacaggcaaagcaacacatgctcatcctcctgcctatgctgagatacgcactcagctccatgtcttgtacacacagaaacattgctggtttcaagaaatgaggtgatcctattatcaaattcaatctgatgtcaaatagcactaagaagttattgtgccttatgaaaaataatgatctctgtctagaaataccatagaccatatatagtctcacattgataattgaaactagaagggtctataatcagcctatgccagggcttcaatggaatagtatccccttatgtttagttgaaatgtccccttaacttgatataatgtgttatgcttatggcgctgtggacaatctgatttttcatgtcaactttccagatgatttgtaacttctctgtgccaaaccttttataaacataaatttttgagatatgtattttaaaattgtagcacatgtttccctgacattttcaatagaggatacaacatcacagaatctttctggatgattctgtgttatcaaggaattgtactgtgctacaattatctctagaatctccagaaaggtggagggctgttcgcccttacactaaatggtctcagttggatttttttttcctgttttctatttcctcttaagtacaccttcaactatattcccatccctctattttaatctgttatgaaggaaggtaaataaaaatgctaaatagaagaaattgtaggtaaggtaagaggaatcaagttctgagtggctgccaaggcactcacagaatcataatcatggctaaatatttatggagggcctactgtggaccaggcactgggctaaatacttacatttacaagaatcattctgagacagatattcaatgatatctggcttcactactcagaagattgtgtgtgtgtttgtgtgtgtgtgtgtgtgtgtatttcactttttgttattgaccatgttctgcaaaattgcagttactcagtgagtgatatccgaaaaagtaaacgtttatgactataggtaatatttaagaaaatgcatggttcatttttaagtttggaatttttatctatatttctcacagatgtgcagtgcacatgcaggcctaagtatatgttgtgtgtgttgtttgtctttgatgtcatggtcccctctcttaggtgctcactcgctttgggtgcacctggcctgctcttcccatgttggcctctgcaaccacacagggatatttctgctatgcaccagcctcactccaccttccttccatcaaaaatatgtgtgtgtgtctcagtccctgtaagtcatgtccttcacagggagaattaacccttcgatatacatggcagagttttgtgggaaaagaattgaatgaaaagtcaggagatcagaattttaaatttgacttagccactaactagccatgtaaccttgggaaagtcatttcccatttctgggtcttgcttttctttctgttaaatgagaggaatgttaaatatctaacagtttagaatcttatgcttacagtgttatctgtgaatgcacatattaaatgtctatgttcttgttgctatgagtcaaggagtgtaaccttctcctttactatgttgaatgtatttttttctggacaagcttacatcttcctcagccatctttgtgagtccttcaagagcagttatcaattgttagttagatattttctatttagagaatgcttaagggattccaatcccgatccaaatcataatttgttcttaagtatactgggcaggtcccctattttaagtcataattttgtatttagtgctttcctggctctcagagagtattaatattgatattaataatatagttaatagtaatattgctatttacatggaaacaaataaaagatctcagaattcactaaaaaaaaaaa

SEQ ID NO: 233 - DNA, 1450 bp, Homo sapiens
  source 1..1450: mol_type = genomic DNA
tttcgctttcattttgggccgagctggaggcggcggggccgtcccggaacggctgcggccgggcaccccgggagttaatccgaaagcgccgcaagccccgcgggccggccgcaccgcacgtgtcaccgagaagctgatgtagagagagacacagaaggagacagaaagcaagagaccagagtcccgggaaagtcctgccgcgcctcgggacaattataaaaatgtggccccctgggtcagcctcccagccaccgccctcacctgccgcggccacaggtctgcatccagcggctcgccctgtgtccctgcagtgccggctcagcatgtgtccagcgcgcagcctcctccttgtggctaccctggtcctcctggaccacctcagtttggccagaaacctccccgtggccactccagacccaggaatgttcccatgccttcaccactcccaaaacctgctgagggccgtcagcaacatgctccagaaggccagacaaactctagaattttacccttgcacttctgaagagattgatcatgaagatatcacaaaagataaaaccagcacagtggaggcctgtttaccattggaattaaccaagaatgagagttgcctaaattccagagagacctctttcataactaatgggagttgcctggcctccagaaagacctcttttatgatggccctgtgccttagtagtatttatgaagacttgaagatgtaccaggtggagttcaagaccatgaatgcaaagcttctgatggatcctaagaggcagatctttctagatcaaaacatgctggcagttattgatgagctgatgcaggccctgaatttcaacagtgagactgtgccacaaaaatcctcccttgaagaaccggatttttataaaactaaaatcaagctctgcatacttcttcatgctttcagaattcgggcagtgactattgatagagtgatgagctatctgaatgcttcctaaaaagcgaggtccctccaaaccgttgtcatttttataaaactttgaaatgaggaaactttgataggatgtggattaagaactagggagggggaaagaaggatgggactattacatccacatgatacctctgatcaagtatttttgacatttactgtggataaattgtttttaagttttcatgaatgaattgctaagaagggaaaatatccatcctgaaggtgtttttcattcactttaatagaagggcaaatatttataagctatttctgtaccaaagtgtttgtggaaacaaacatgtaagcataacttattttaaaatatttatttatataacttggtaatcatgaaagcatctgagctaacttatatttatttatgttatatttattaaattatttatcaagtgtatttgaaaaatatttttaagtgttctaaaaataaaagtattgaattaaagtgaaaaaaaa

SEQ ID NO: 234 - DNA, 2207 bp, Homo sapiens
  source 1..2207: mol_type = genomic DNA
cacttcctccccagacaggggtagtgcgaggccgggcacagccttcctgtgtggttttaccgcccagagagcgtcatggacctggggaaaccaatgaaaagcgtgctggtggtggctctccttgtcattttccaggtatgcctgtgtcaagatgaggtcacggacgattacatcggagacaacaccacagtggactacactttgttcgagtctttgtgctccaagaaggacgtgcggaactttaaagcctggttcctccctatcatgtactccatcatttgtttcgtgggcctactgggcaatgggctggtcgtgttgacctatatctatttcaagaggctcaagaccatgaccgatacctacctgctcaacctggcggtggcagacatcctcttcctcctgacccttcccttctgggcctacagcgcggccaagtcctgggtcttcggtgtccacttttgcaagctcatctttgccatctacaagatgagcttcttcagtggcatgctcctacttctttgcatcagcattgaccgctacgtggccatcgtccaggctgtctcagctcaccgccaccgtgcccgcgtccttctcatcagcaagctgtcctgtgtgggcatctggatactagccacagtgctctccatcccagagctcctgtacagtgacctccagaggagcagcagtgagcaagcgatgcgatgctctctcatcacagagcatgtggaggcctttatcaccatccaggtggcccagatggtgatcggctttctggtccccctgctggccatgagcttctgttaccttgtcatcatccgcaccctgctccaggcacgcaactttgagcgcaacaaggccatcaaggtgatcatcgctgtggtcgtggtcttcatagtcttccagctgccctacaatggggtggtcctggcccagacggtggccaacttcaacatcaccagtagcacctgtgagctcagtaagcaactcaacatcgcctacgacgtcacctacagcctggcctgcgtccgctgctgcgtcaaccctttcttgtacgccttcatcggcgtcaagttccgcaacgatctcttcaagctcttcaaggacctgggctgcctcagccaggagcagctccggcagtggtcttcctgtcggcacatccggcgctcctccatgagtgtggaggccgagaccaccaccaccttctccccataggcgactcttctgcctggactagagggacctctcccagggtccctggggtggggatagggagcagatgcaatgactcaggacatccccccgccaaaagctgctcagggaaaagcagctctcccctcagagtgcaagcccctgctccagaagatagcttcaccccaatcccagctacctcaaccaatgccaaaaaaagacagggctgataagctaacaccagacagacaacactgggaaacagaggctattgtcccctaaaccaaaaactgaaagtgaaagtccagaaactgttcccacctgctggagtgaaggggccaaggagggtgagtgcaaggggcgtgggagtggcctgaagagtcctctgaatgaaccttctggcctcccacagactcaaatgctcagaccagctcttccgaaaaccaggccttatctccaagaccagagatagtggggagacttcttggcttggtgaggaaaagcggacatcagctggtcaaacaaactctctgaacccctccctccatcgttttcttcactgtcctccaagccagcgggaatggcagctgccacgccgccctaaaagcacactcatcccctcacttgccgcgtcgccctcccaggctctcaacaggggagagtgtggtgtttcctgcaggccaggccagctgcctccgcgtgatcaaagccacactctgggctccagagtggggatgacatgcactcagctcttggctccactgggatgggaggagaggacaagggaaatgtcaggggcggggagggtgacagtggccgcccaaggcccacgagcttgttctttgttctttgtcacagggactgaaaacctctcctcatgttctgctttcgattcgttaagagagcaacattttacccacacacagataaagttttcccttgaggaaacaacagctttaaaagaaaaagaaaaaaaaagtctttggtaaatggcaaaaaaaaaaaaaaaaaaaaaaaaa

SEQ ID NO: 235-329 - skipped (95 entries)

SEQ ID NO: 330 - RNA, 20 nt, Homo sapiens
  source 1..20: mol_type = genomic RNA
gacaagtactgagtgaactc

SEQ ID NO: 331 - RNA, 20 nt, Homo sapiens
  source 1..20: mol_type = genomic RNA
acaagtactgagtgaactca

SEQ ID NO: 332 - RNA, 20 nt, Homo sapiens
  source 1..20: mol_type = genomic RNA
caagtactgagtgaactcaa

SEQ ID NO: 333 - RNA, 20 nt, Homo sapiens
  source 1..20: mol_type = genomic RNA
aagtactgagtgaactcaaa

SEQ ID NO: 334 - RNA, 20 nt, Homo sapiens
  source 1..20: mol_type = genomic RNA
agtactgagtgaactcaaac

SEQ ID NO: 335 - RNA, 20 nt, Homo sapiens
  source 1..20: mol_type = genomic RNA
gtactgagtgaactcaaacc

SEQ ID NO: 336 - RNA, 20 nt, Homo sapiens
  source 1..20: mol_type = genomic RNA
tactgagtgaactcaaaccc

SEQ ID NO: 337 - RNA, 20 nt, Homo sapiens
  source 1..20: mol_type = genomic RNA
actgagtgaactcaaaccct

SEQ ID NO: 338 - RNA, 20 nt, Homo sapiens
  source 1..20: mol_type = genomic RNA
ctgagtgaactcaaaccctc

SEQ ID NO: 339 - RNA, 20 nt, Homo sapiens
  source 1..20: mol_type = genomic RNA
tgagtgaactcaaaccctct

SEQ ID NO: 340 - RNA, 20 nt, Homo sapiens
  source 1..20: mol_type = genomic RNA
gagtgaactcaaaccctctg

SEQ ID NO: 341 - RNA, 20 nt, Homo sapiens
  source 1..20: mol_type = genomic RNA
agtgaactcaaaccctctgt

SEQ ID NO: 342 - RNA, 20 nt, Homo sapiens
  source 1..20: mol_type = genomic RNA
gtgaactcaaaccctctgta

SEQ ID NO: 343 - RNA, 20 nt, Homo sapiens
  source 1..20: mol_type = genomic RNA
tgaactcaaaccctctgtaa

SEQ ID NO: 344 - RNA, 20 nt, Homo sapiens
  source 1..20: mol_type = genomic RNA
gaactcaaaccctctgtaaa

SEQ ID NO: 345 - RNA, 20 nt, Homo sapiens
  source 1..20: mol_type = genomic RNA
aactcaaaccctctgtaaag

SEQ ID NO: 346 - RNA, 20 nt, Homo sapiens
  source 1..20: mol_type = genomic RNA
actcaaaccctctgtaaagt

SEQ ID NO: 347 - RNA, 20 nt, Homo sapiens
  source 1..20: mol_type = genomic RNA
ctcaaaccctctgtaaagta

SEQ ID NO: 348 - RNA, 20 nt, Homo sapiens
  source 1..20: mol_type = genomic RNA
tcaaaccctctgtaaagtaa

SEQ ID NO: 349 - RNA, 20 nt, Homo sapiens
  source 1..20: mol_type = genomic RNA
caaaccctctgtaaagtaac

SEQ ID NO: 350 - RNA, 20 nt, Homo sapiens
  source 1..20: mol_type = genomic RNA
aaaccctctgtaaagtaaca

SEQ ID NO: 351 - RNA, 20 nt, Homo sapiens
  source 1..20: mol_type = genomic RNA
aaccctctgtaaagtaacag

SEQ ID NO: 352 - RNA, 20 nt, Homo sapiens
  source 1..20: mol_type = genomic RNA
accctctgtaaagtaacaga

SEQ ID NO: 353 - RNA, 20 nt, Homo sapiens
  source 1..20: mol_type = genomic RNA
ccctctgtaaagtaacagaa

SEQ ID NO: 354 - RNA, 20 nt, Homo sapiens
  source 1..20: mol_type = genomic RNA
cctctgtaaagtaacagaag

SEQ ID NO: 355 - RNA, 20 nt, Homo sapiens
  source 1..20: mol_type = genomic RNA
ctctgtaaagtaacagaagt

SEQ ID NO: 356 - RNA, 20 nt, Homo sapiens
  source 1..20: mol_type = genomic RNA
tctgtaaagtaacagaagtt

SEQ ID NO: 357 - RNA, 20 nt, Homo sapiens
  source 1..20: mol_type = genomic RNA
ctgtaaagtaacagaagtta

SEQ ID NO: 358 - RNA, 20 nt, Homo sapiens
  source 1..20: mol_type = genomic RNA
tgtaaagtaacagaagttag

SEQ ID NO: 359 - RNA, 20 nt, Homo sapiens
  source 1..20: mol_type = genomic RNA
gtaaagtaacagaagttaga

SEQ ID NO: 360 - RNA, 20 nt, Homo sapiens
  source 1..20: mol_type = genomic RNA
taaagtaacagaagttagaa

SEQ ID NO: 361 - RNA, 20 nt, Homo sapiens
  source 1..20: mol_type = genomic RNA
aaagtaacagaagttagaag

SEQ ID NO: 362 - RNA, 20 nt, Homo sapiens
  source 1..20: mol_type = genomic RNA
aagtaacagaagttagaagg

SEQ ID NO: 363 - RNA, 20 nt, Homo sapiens
  source 1..20: mol_type = genomic RNA
agtaacagaagttagaaggg

SEQ ID NO: 364 - RNA, 20 nt, Homo sapiens
  source 1..20: mol_type = genomic RNA
gtaacagaagttagaagggg

SEQ ID NO: 365 - RNA, 20 nt, Homo sapiens
  source 1..20: mol_type = genomic RNA
taacagaagttagaagggga

SEQ ID NO: 366 - RNA, 20 nt, Homo sapiens
  source 1..20: mol_type = genomic RNA
aacagaagttagaaggggaa

SEQ ID NO: 367 - RNA, 20 nt, Homo sapiens
  source 1..20: mol_type = genomic RNA
acagaagttagaaggggaaa

SEQ ID NO: 368 - RNA, 20 nt, Homo sapiens
  source 1..20: mol_type = genomic RNA
cagaagttagaaggggaaat

SEQ ID NO: 369 - RNA, 20 nt, Homo sapiens
  source 1..20: mol_type = genomic RNA
agaagttagaaggggaaatg

SEQ ID NO: 370 - RNA, 20 nt, Homo sapiens
  source 1..20: mol_type = genomic RNA
gaagttagaaggggaaatgt

SEQ ID NO: 371 - RNA, 20 nt, Homo sapiens
  source 1..20: mol_type = genomic RNA
aagttagaaggggaaatgtc

SEQ ID NO: 372 - RNA, 20 nt, Homo sapiens
  source 1..20: mol_type = genomic RNA
agttagaaggggaaatgtcg

SEQ ID NO: 373 - RNA, 20 nt, Homo sapiens
  source 1..20: mol_type = genomic RNA
gttagaaggggaaatgtcgc

SEQ ID NO: 374 - RNA, 20 nt, Homo sapiens
  source 1..20: mol_type = genomic RNA
ttagaaggggaaatgtcgcc

SEQ ID NO: 375 - RNA, 20 nt, Homo sapiens
  source 1..20: mol_type = genomic RNA
tagaaggggaaatgtcgcct

SEQ ID NO: 376 - RNA, 20 nt, Homo sapiens
  source 1..20: mol_type = genomic RNA
agaaggggaaatgtcgcctc

SEQ ID NO: 377 - RNA, 20 nt, Homo sapiens
  source 1..20: mol_type = genomic RNA
gaaggggaaatgtcgcctct

SEQ ID NO: 378 - RNA, 20 nt, Homo sapiens
  source 1..20: mol_type = genomic RNA
aaggggaaatgtcgcctctc

SEQ ID NO: 379 - RNA, 20 nt, Homo sapiens
  source 1..20: mol_type = genomic RNA
aggggaaatgtcgcctctct

SEQ ID NO: 380 - RNA, 20 nt, Homo sapiens
  source 1..20: mol_type = genomic RNA
ggggaaatgtcgcctctctg

SEQ ID NO: 381 - RNA, 20 nt, Homo sapiens
  source 1..20: mol_type = genomic RNA
gggaaatgtcgcctctctga

SEQ ID NO: 382 - RNA, 20 nt, Homo sapiens
  source 1..20: mol_type = genomic RNA
ggaaatgtcgcctctctgaa

SEQ ID NO: 383 - RNA, 20 nt, Homo sapiens
  source 1..20: mol_type = genomic RNA
gaaatgtcgcctctctgaag

SEQ ID NO: 384 - RNA, 20 nt, Homo sapiens
  source 1..20: mol_type = genomic RNA
aaatgtcgcctctctgaaga

SEQ ID NO: 385 - RNA, 20 nt, Homo sapiens
  source 1..20: mol_type = genomic RNA
aatgtcgcctctctgaagat

SEQ ID NO: 386 - RNA, 20 nt, Homo sapiens
  source 1..20: mol_type = genomic RNA
atgtcgcctctctgaagatt

SEQ ID NO: 387 - RNA, 20 nt, Homo sapiens
  source 1..20: mol_type = genomic RNA
tgtcgcctctctgaagatta

SEQ ID NO: 388 - RNA, 20 nt, Homo sapiens
  source 1..20: mol_type = genomic RNA
gtcgcctctctgaagattac

SEQ ID NO: 389 - RNA, 20 nt, Homo sapiens
  source 1..20: mol_type = genomic RNA
tcgcctctctgaagattacc

SEQ ID NO: 390 - RNA, 20 nt, Homo sapiens
  source 1..20: mol_type = genomic RNA
cgcctctctgaagattaccc

SEQ ID NO: 391 - RNA, 20 nt, Homo sapiens
  source 1..20: mol_type = genomic RNA
gcctctctgaagattaccca

SEQ ID NO: 392 - RNA, 20 nt, Homo sapiens
  source 1..20: mol_type = genomic RNA
cctctctgaagattacccaa

SEQ ID NO: 393 - RNA, 20 nt, Homo sapiens
  source 1..20: mol_type = genomic RNA
ctctctgaagattacccaaa

SEQ ID NO: 394 - RNA, 20 nt, Homo sapiens
  source 1..20: mol_type = genomic RNA
tctctgaagattacccaaag

SEQ ID NO: 395 - RNA, 20 nt, Homo sapiens
  source 1..20: mol_type = genomic RNA
ctctgaagattacccaaaga

SEQ ID NO: 396 - RNA, 20 nt, Homo sapiens
  source 1..20: mol_type = genomic RNA
tctgaagattacccaaagaa

SEQ ID NO: 397 - RNA, 20 nt, Homo sapiens
  source 1..20: mol_type = genomic RNA
ctgaagattacccaaagaaa

SEQ ID NO: 398 - RNA, 20 nt, Homo sapiens
  source 1..20: mol_type = genomic RNA
tgaagattacccaaagaaaa

SEQ ID NO: 399 - RNA, 20 nt, Homo sapiens
  source 1..20: mol_type = genomic RNA
gaagattacccaaagaaaaa

SEQ ID NO: 400 - RNA, 20 nt, Homo sapiens
  source 1..20: mol_type = genomic RNA
aagattacccaaagaaaaag

SEQ ID NO: 401 - RNA, 20 nt, Homo sapiens
  source 1..20: mol_type = genomic RNA
agattacccaaagaaaaagt

SEQ ID NO: 402 - RNA, 20 nt, Homo sapiens
  source 1..20: mol_type = genomic RNA
gattacccaaagaaaaagtg

SEQ ID NO: 403 - RNA, 20 nt, Homo sapiens
  source 1..20: mol_type = genomic RNA
attacccaaagaaaaagtga

SEQ ID NO: 404 - RNA, 20 nt, Homo sapiens
  source 1..20: mol_type = genomic RNA
ttacccaaagaaaaagtgat

SEQ ID NO: 405 - RNA, 20 nt, Homo sapiens
  source 1..20: mol_type = genomic RNA
tacccaaagaaaaagtgatt

SEQ ID NO: 406 - RNA, 20 nt, Homo sapiens
  source 1..20: mol_type = genomic RNA
acccaaagaaaaagtgattt

SEQ ID NO: 407 - RNA, 20 nt, Homo sapiens
  source 1..20: mol_type = genomic RNA
cccaaagaaaaagtgatttg

SEQ ID NO: 408 - RNA, 20 nt, Homo sapiens
  source 1..20: mol_type = genomic RNA
ccaaagaaaaagtgatttgt

SEQ ID NO: 409 - RNA, 20 nt, Homo sapiens
  source 1..20: mol_type = genomic RNA
caaagaaaaagtgatttgtc

SEQ ID NO: 410 - RNA, 20 nt, Homo sapiens
  source 1..20: mol_type = genomic RNA
aaagaaaaagtgatttgtca

SEQ ID NO: 411 - RNA, 20 nt, Homo sapiens
  source 1..20: mol_type = genomic RNA
aagaaaaagtgatttgtcat

SEQ ID NO: 412 - RNA, 20 nt, Homo sapiens
  source 1..20: mol_type = genomic RNA
agaaaaagtgatttgtcatt

SEQ ID NO: 413 - RNA, 20 nt, Homo sapiens
  source 1..20: mol_type = genomic RNA
gaaaaagtgatttgtcattg

SEQ ID NO: 414 - RNA, 20 nt, Homo sapiens
  source 1..20: mol_type = genomic RNA
aaaaagtgatttgtcattgc

SEQ ID NO: 415 - RNA, 20 nt, Homo sapiens
  source 1..20: mol_type = genomic RNA
aaaagtgatttgtcattgct

SEQ ID NO: 416 - RNA, 20 nt, Homo sapiens
  source 1..20: mol_type = genomic RNA
aaagtgatttgtcattgctt

SEQ ID NO: 417 - RNA, 20 nt, Homo sapiens
  source 1..20: mol_type = genomic RNA
aagtgatttgtcattgcttt

SEQ ID NO: 418 - RNA, 20 nt, Homo sapiens
  source 1..20: mol_type = genomic RNA
agtgatttgtcattgcttta

SEQ ID NO: 419 - RNA, 20 nt, Homo sapiens
  source 1..20: mol_type = genomic RNA
gtgatttgtcattgctttat

SEQ ID NO: 420 - RNA, 20 nt, Homo sapiens
  source 1..20: mol_type = genomic RNA
tgatttgtcattgctttata

SEQ ID NO: 421 - RNA, 20 nt, Homo sapiens
  source 1..20: mol_type = genomic RNA
gatttgtcattgctttatag

SEQ ID NO: 422 - RNA, 20 nt, Homo sapiens
  source 1..20: mol_type = genomic RNA
atttgtcattgctttataga

SEQ ID NO: 423 - RNA, 20 nt, Homo sapiens
  source 1..20: mol_type = genomic RNA
tttgtcattgctttatagac

SEQ ID NO: 424 - RNA, 20 nt, Homo sapiens
  source 1..20: mol_type = genomic RNA
ttgtcattgctttatagact

SEQ ID NO: 425 - RNA, 20 nt, Homo sapiens
  source 1..20: mol_type = genomic RNA
tgtcattgctttatagactg

SEQ ID NO: 426 - RNA, 20 nt, Homo sapiens
  source 1..20: mol_type = genomic RNA
gtcattgctttatagactgt

SEQ ID NO: 427 - RNA, 20 nt, Homo sapiens
  source 1..20: mol_type = genomic RNA
tcattgctttatagactgta

SEQ ID NO: 428 - RNA, 20 nt, Homo sapiens
  source 1..20: mol_type = genomic RNA
cattgctttatagactgtaa

SEQ ID NO: 429 - RNA, 20 nt, Homo sapiens
  source 1..20: mol_type = genomic RNA
attgctttatagactgtaag

SEQ ID NO: 430 - RNA, 20 nt, Homo sapiens
  source 1..20: mol_type = genomic RNA
ttgctttatagactgtaaga

SEQ ID NO: 431 - RNA, 20 nt, Homo sapiens
  source 1..20: mol_type = genomic RNA
tgctttatagactgtaagaa

SEQ ID NO: 432 - RNA, 20 nt, Homo sapiens
  source 1..20: mol_type = genomic RNA
gctttatagactgtaagaag

SEQ ID NO: 433 - RNA, 20 nt, Homo sapiens
  source 1..20: mol_type = genomic RNA
ctttatagactgtaagaaga

SEQ ID NO: 434 - RNA, 20 nt, Homo sapiens
  source 1..20: mol_type = genomic RNA
tttatagactgtaagaagag

SEQ ID NO: 435 - RNA, 20 nt, Homo sapiens
  source 1..20: mol_type = genomic RNA
ttatagactgtaagaagaga

SEQ ID NO: 436 - RNA, 20 nt, Homo sapiens
  source 1..20: mol_type = genomic RNA
tatagactgtaagaagagaa

SEQ ID NO: 437 - RNA, 20 nt, Homo sapiens
  source 1..20: mol_type = genomic RNA
atagactgtaagaagagaac

SEQ ID NO: 438 - RNA, 20 nt, Homo sapiens
  source 1..20: mol_type = genomic RNA
tagactgtaagaagagaaca

SEQ ID NO: 439 - RNA, 20 nt, Homo sapiens
  source 1..20: mol_type = genomic RNA
agactgtaagaagagaacat

SEQ ID NO: 440 - RNA, 20 nt, Homo sapiens
  source 1..20: mol_type = genomic RNA
gactgtaagaagagaacatc

SEQ ID NO: 441 - RNA, 20 nt, Homo sapiens
  source 1..20: mol_type = genomic RNA
actgtaagaagagaacatct

SEQ ID NO: 442 - RNA, 20 nt, Homo sapiens
  source 1..20: mol_type = genomic RNA
ctgtaagaagagaacatctc

SEQ ID NO: 443 - RNA, 20 nt, Homo sapiens
  source 1..20: mol_type = genomic RNA
tgtaagaagagaacatctca

SEQ ID NO: 444 - RNA, 20 nt, Homo sapiens
  source 1..20: mol_type = genomic RNA
gtaagaagagaacatctcag

SEQ ID NO: 445 - RNA, 20 nt, Homo sapiens
  source 1..20: mol_type = genomic RNA
taagaagagaacatctcaga

SEQ ID NO: 446 - RNA, 20 nt, Homo sapiens
  source 1..20: mol_type = genomic RNA
aagaagagaacatctcagaa

SEQ ID NO: 447 - RNA, 20 nt, Homo sapiens
  source 1..20: mol_type = genomic RNA
agaagagaacatctcagaag

SEQ ID NO: 448 - RNA, 20 nt, Homo sapiens
  source 1..20: mol_type = genomic RNA
gaagagaacatctcagaagt

SEQ ID NO: 449 - RNA, 20 nt, Homo sapiens
  source 1..20: mol_type = genomic RNA
aagagaacatctcagaagtg

SEQ ID NO: 450 - RNA, 20 nt, Homo sapiens
  source 1..20: mol_type = genomic RNA
agagaacatctcagaagtgg

SEQ ID NO: 451 - RNA, 20 nt, Homo sapiens
  source 1..20: mol_type = genomic RNA
gagaacatctcagaagtgga

SEQ ID NO: 452 - RNA, 20 nt, Homo sapiens
  source 1..20: mol_type = genomic RNA
agaacatctcagaagtggag

SEQ ID NO: 453 - RNA, 20 nt, Homo sapiens
  source 1..20: mol_type = genomic RNA
gaacatctcagaagtggagt

SEQ ID NO: 454 - RNA, 20 nt, Homo sapiens
  source 1..20: mol_type = genomic RNA
aacatctcagaagtggagtc

SEQ ID NO: 455 - RNA, 20 nt, Homo sapiens
  source 1..20: mol_type = genomic RNA
acatctcagaagtggagtct

SEQ ID NO: 456 - RNA, 20 nt, Homo sapiens
  source 1..20: mol_type = genomic RNA
catctcagaagtggagtctt

SEQ ID NO: 457 - RNA, 20 nt, Homo sapiens
  source 1..20: mol_type = genomic RNA
atctcagaagtggagtctta

SEQ ID NO: 458 - RNA, 20 nt, Homo sapiens
  source 1..20: mol_type = genomic RNA
tctcagaagtggagtcttac

SEQ ID NO: 459 - RNA, 20 nt, Homo sapiens
  source 1..20: mol_type = genomic RNA
ctcagaagtggagtcttacc

SEQ ID NO: 460 - RNA, 20 nt, Homo sapiens
  source 1..20: mol_type = genomic RNA
tcagaagtggagtcttaccc

SEQ ID NO: 461 - RNA, 20 nt, Homo sapiens
  source 1..20: mol_type = genomic RNA
cagaagtggagtcttaccct

SEQ ID NO: 462 - RNA, 20 nt, Homo sapiens
  source 1..20: mol_type = genomic RNA
agaagtggagtcttaccctg

SEQ ID NO: 463 - RNA, 20 nt, Homo sapiens
  source 1..20: mol_type = genomic RNA
gaagtggagtcttaccctga

SEQ ID NO: 464 - RNA, 20 nt, Homo sapiens
  source 1..20: mol_type = genomic RNA
aagtggagtcttaccctgaa

SEQ ID NO: 465 - RNA, 20 nt, Homo sapiens
  source 1..20: mol_type = genomic RNA
agtggagtcttaccctgaaa

SEQ ID NO: 466 - RNA, 20 nt, Homo sapiens
  source 1..20: mol_type = genomic RNA
gtggagtcttaccctgaaat

SEQ ID NO: 467 - RNA, 20 nt, Homo sapiens
  source 1..20: mol_type = genomic RNA
tggagtcttaccctgaaatc

SEQ ID NO: 468 - RNA, 20 nt, Homo sapiens
  source 1..20: mol_type = genomic RNA
ggagtcttaccctgaaatca

SEQ ID NO: 469 - RNA, 20 nt, Homo sapiens
  source 1..20: mol_type = genomic RNA
gagtcttaccctgaaatcaa

SEQ ID NO: 470 - RNA, 20 nt, Homo sapiens
  source 1..20: mol_type = genomic RNA
agtcttaccctgaaatcaaa

SEQ ID NO: 471 - RNA, 20 nt, Homo sapiens
  source 1..20: mol_type = genomic RNA
gtcttaccctgaaatcaaag

SEQ ID NO: 472 - RNA, 20 nt, Homo sapiens
  source 1..20: mol_type = genomic RNA
tcttaccctgaaatcaaagg

SEQ ID NO: 473 - RNA, 20 nt, Homo sapiens
  source 1..20: mol_type = genomic RNA
cttaccctgaaatcaaagga

SEQ ID NO: 474 - RNA, 20 nt, Homo sapiens
  source 1..20: mol_type = genomic RNA
ttaccctgaaatcaaaggat

SEQ ID NO: 475 - RNA, 20 nt, Homo sapiens
  source 1..20: mol_type = genomic RNA
taccctgaaatcaaaggatt

SEQ ID NO: 476 - RNA, 20 nt, Homo sapiens
  source 1..20: mol_type = genomic RNA
accctgaaatcaaaggattt

SEQ ID NO: 477 - RNA, 20 nt, Homo sapiens
  source 1..20: mol_type = genomic RNA
ccctgaaatcaaaggattta

SEQ ID NO: 478 - RNA, 20 nt, Homo sapiens
  source 1..20: mol_type = genomic RNA
cctgaaatcaaaggatttaa

SEQ ID NO: 479 - RNA, 20 nt, Homo sapiens
  source 1..20: mol_type = genomic RNA
ctgaaatcaaaggatttaaa

SEQ ID NO: 480 - RNA, 20 nt, Homo sapiens
  source 1..20: mol_type = genomic RNA
tgaaatcaaaggatttaaag

SEQ ID NO: 481 - RNA, 20 nt, Homo sapiens
  source 1..20: mol_type = genomic RNA
gaaatcaaaggatttaaaga

SEQ ID NO: 482 - RNA, 20 nt, Homo sapiens
  source 1..20: mol_type = genomic RNA
aaatcaaaggatttaaagaa

SEQ ID NO: 483 - RNA, 20 nt, Homo sapiens
  source 1..20: mol_type = genomic RNA
aatcaaaggatttaaagaaa

SEQ ID NO: 484 - RNA, 20 nt, Homo sapiens
  source 1..20: mol_type = genomic RNA
atcaaaggatttaaagaaaa

SEQ ID NO: 485 - RNA, 20 nt, Homo sapiens
  source 1..20: mol_type = genomic RNA
tcaaaggatttaaagaaaaa

SEQ ID NO: 486 - RNA, 20 nt, Homo sapiens
  source 1..20: mol_type = genomic RNA
caaaggatttaaagaaaaag

SEQ ID NO: 487 - RNA, 20 nt, Homo sapiens
  source 1..20: mol_type = genomic RNA
aaaggatttaaagaaaaagt

SEQ ID NO: 488 - RNA, 20 nt, Homo sapiens
  source 1..20: mol_type = genomic RNA
aaggatttaaagaaaaagtg

SEQ ID NO: 489 - RNA, 20 nt, Homo sapiens
  source 1..20: mol_type = genomic RNA
aggatttaaagaaaaagtgg

SEQ ID NO: 490 - RNA, 20 nt, Homo sapiens
  source 1..20: mol_type = genomic RNA
ggatttaaagaaaaagtgga

SEQ ID NO: 491 - RNA, 20 nt, Homo sapiens
  source 1..20: mol_type = genomic RNA
gatttaaagaaaaagtggaa

SEQ ID NO: 492 - RNA, 20 nt, Homo sapiens
  source 1..20: mol_type = genomic RNA
atttaaagaaaaagtggaat

SEQ ID NO: 493 - RNA, 20 nt, Homo sapiens
  source 1..20: mol_type = genomic RNA
tttaaagaaaaagtggaatt

SEQ ID NO: 494 - RNA, 20 nt, Homo sapiens
  source 1..20: mol_type = genomic RNA
ttaaagaaaaagtggaattt

SEQ ID NO: 495 - RNA, 20 nt, Homo sapiens
  source 1..20: mol_type = genomic RNA
taaagaaaaagtggaatttt

SEQ ID NO: 496 - RNA, 20 nt, Homo sapiens
  source 1..20: mol_type = genomic RNA
aaagaaaaagtggaattttt

SEQ ID NO: 497 - RNA, 20 nt, Homo sapiens
  source 1..20: mol_type = genomic RNA
aagaaaaagtggaatttttc

SEQ ID NO: 498 - RNA, 20 nt, Homo sapiens
  source 1..20: mol_type = genomic RNA
agaaaaagtggaatttttct

SEQ ID NO: 499 - RNA, 20 nt, Homo sapiens
  source 1..20: mol_type = genomic RNA
gaaaaagtggaatttttctt

SEQ ID NO: 500 - RNA, 20 nt, Homo sapiens
  source 1..20: mol_type = genomic RNA
aaaaagtggaatttttcttc

SEQ ID NO: 501 - RNA, 20 nt, Homo sapiens
  source 1..20: mol_type = genomic RNA
aaaagtggaatttttcttca

SEQ ID NO: 502 - RNA, 20 nt, Homo sapiens
  source 1..20: mol_type = genomic RNA
aaagtggaatttttcttcag

SEQ ID NO: 503 - RNA, 20 nt, Homo sapiens
  source 1..20: mol_type = genomic RNA
aagtggaatttttcttcagc

SEQ ID NO: 504 - RNA, 20 nt, Homo sapiens
  source 1..20: mol_type = genomic RNA
agtggaatttttcttcagca

SEQ ID NO: 505 - RNA, 20 nt, Homo sapiens
  source 1..20: mol_type = genomic RNA
gtggaatttttcttcagcaa

SEQ ID NO: 506 - RNA, 20 nt, Homo sapiens
  source 1..20: mol_type = genomic RNA
tggaatttttcttcagcaag

SEQ ID NO: 507 - RNA, 20 nt, Homo sapiens
  source 1..20: mol_type = genomic RNA
ggaatttttcttcagcaagc

SEQ ID NO: 508 - RNA, 20 nt, Homo sapiens
  source 1..20: mol_type = genomic RNA
gaatttttcttcagcaagct

SEQ ID NO: 509 - RNA, 20 nt, Homo sapiens
  source 1..20: mol_type = genomic RNA
aatttttcttcagcaagctg

SEQ ID NO: 510 - RNA, 20 nt, Homo sapiens
  source 1..20: mol_type = genomic RNA
atttttcttcagcaagctgt

SEQ ID NO: 511 - RNA, 20 nt, Homo sapiens
  source 1..20: mol_type = genomic RNA
tttttcttcagcaagctgtg

SEQ ID NO: 512 - RNA, 20 nt, Homo sapiens
  source 1..20: mol_type = genomic RNA
ttttcttcagcaagctgtga

SEQ ID NO: 513 - RNA, 20 nt, Homo sapiens
  source 1..20: mol_type = genomic RNA
tttcttcagcaagctgtgaa

SEQ ID NO: 514 - RNA, 20 nt, Homo sapiens
  source 1..20: mol_type = genomic RNA
ttcttcagcaagctgtgaaa

SEQ ID NO: 515 - RNA, 20 nt, Homo sapiens
  source 1..20: mol_type = genomic RNA
tcttcagcaagctgtgaaac

SEQ ID NO: 516 - RNA, 20 nt, Homo sapiens
  source 1..20: mol_type = genomic RNA
cttcagcaagctgtgaaact

SEQ ID NO: 517 - RNA, 20 nt, Homo sapiens
  source 1..20: mol_type = genomic RNA
ttcagcaagctgtgaaacta

SEQ ID NO: 518 - RNA, 20 nt, Homo sapiens
  source 1..20: mol_type = genomic RNA
tcagcaagctgtgaaactaa

SEQ ID NO: 519 - RNA, 20 nt, Homo sapiens
  source 1..20: mol_type = genomic RNA
cagcaagctgtgaaactaaa

SEQ ID NO: 520 - RNA, 20 nt, Homo sapiens
  source 1..20: mol_type = genomic RNA
agcaagctgtgaaactaaat

SEQ ID NO: 521 - RNA, 20 nt, Homo sapiens
  source 1..20: mol_type = genomic RNA
gcaagctgtgaaactaaatc

SEQ ID NO: 522 - RNA, 20 nt, Homo sapiens
  source 1..20: mol_type = genomic RNA
caagctgtgaaactaaatcc

SEQ ID NO: 523 - RNA, 20 nt, Homo sapiens
  source 1..20: mol_type = genomic RNA
aagctgtgaaactaaatcca

SEQ ID NO: 524 - RNA, 20 nt, Homo sapiens
  source 1..20: mol_type = genomic RNA
agctgtgaaactaaatccac

SEQ ID NO: 525 - RNA, 20 nt, Homo sapiens
  source 1..20: mol_type = genomic RNA
gctgtgaaactaaatccaca

SEQ ID NO: 526 - RNA, 20 nt, Homo sapiens
  source 1..20: mol_type = genomic RNA
ctgtgaaactaaatccacaa

SEQ ID NO: 527 - RNA, 20 nt, Homo sapiens
  source 1..20: mol_type = genomic RNA
tgtgaaactaaatccacaac

SEQ ID NO: 528 - RNA, 20 nt, Homo sapiens
  source 1..20: mol_type = genomic RNA
gtgaaactaaatccacaacc

SEQ ID NO: 529 - RNA, 20 nt, Homo sapiens
  source 1..20: mol_type = genomic RNA
tgaaactaaatccacaacct

SEQ ID NO: 530 - RNA, 20 nt, Homo sapiens
  source 1..20: mol_type = genomic RNA
gaaactaaatccacaacctt

SEQ ID NO: 531 - RNA, 20 nt, Homo sapiens
  source 1..20: mol_type = genomic RNA
aaactaaatccacaaccttt

SEQ ID NO: 532 - RNA, 20 nt, Homo sapiens
  source 1..20: mol_type = genomic RNA
aactaaatccacaacctttg

SEQ ID NO: 533 - RNA, 20 nt, Homo sapiens
  source 1..20: mol_type = genomic RNA
actaaatccacaacctttgg

SEQ ID NO: 534 - RNA, 20 nt, Homo sapiens
  source 1..20: mol_type = genomic RNA
ctaaatccacaacctttgga

SEQ ID NO: 535 - RNA, 20 nt, Homo sapiens
  source 1..20: mol_type = genomic RNA
taaatccacaacctttggag

SEQ ID NO: 536 - RNA, 20 nt, Homo sapiens
  source 1..20: mol_type = genomic RNA
aaatccacaacctttggaga

SEQ ID NO: 537 - RNA, 20 nt, Homo sapiens
  source 1..20: mol_type = genomic RNA
aatccacaacctttggagac

SEQ ID NO: 538 - RNA, 20 nt, Homo sapiens
  source 1..20: mol_type = genomic RNA
atccacaacctttggagacc

SEQ ID NO: 539 - RNA, 20 nt, Homo sapiens
  source 1..20: mol_type = genomic RNA
tccacaacctttggagaccc

SEQ ID NO: 540 - RNA, 20 nt, Homo sapiens
  source 1..20: mol_type = genomic RNA
ccacaacctttggagaccca

SEQ ID NO: 541 - RNA, 20 nt, Homo sapiens
  source 1..20: mol_type = genomic RNA
cacaacctttggagacccag

SEQ ID NO: 542 - RNA, 20 nt, Homo sapiens
  source 1..20: mol_type = genomic RNA
acaacctttggagacccagg

SEQ ID NO: 543 - RNA, 20 nt, Homo sapiens
  source 1..20: mol_type = genomic RNA
caacctttggagacccagga

SEQ ID NO: 544 - RNA, 20 nt, Homo sapiens
  source 1..20: mol_type = genomic RNA
aacctttggagacccaggaa

SEQ ID NO: 545 - RNA, 20 nt, Homo sapiens
  source 1..20: mol_type = genomic RNA
acctttggagacccaggaac

SEQ ID NO: 546 - RNA, 20 nt, Homo sapiens
  source 1..20: mol_type = genomic RNA
cctttggagacccaggaaca

SEQ ID NO: 547 - RNA, 20 nt, Homo sapiens
  source 1..20: mol_type = genomic RNA
ctttggagacccaggaacac

SEQ ID NO: 548 - RNA, 20 nt, Homo sapiens
  source 1..20: mol_type = genomic RNA
tttggagacccaggaacacc

SEQ ID NO: 549 - RNA, 20 nt, Homo sapiens
  source 1..20: mol_type = genomic RNA
ttggagacccaggaacaccc

SEQ ID NO: 550 - RNA, 20 nt, Homo sapiens
  source 1..20: mol_type = genomic RNA
tggagacccaggaacaccct

SEQ ID NO: 551 - RNA, 20 nt, Homo sapiens
  source 1..20: mol_type = genomic RNA
ggagacccaggaacaccctc

SEQ ID NO: 552 - RNA, 20 nt, Homo sapiens
  source 1..20: mol_type = genomic RNA
gagacccaggaacaccctcc

SEQ ID NO: 553 - RNA, 20 nt, Homo sapiens
  source 1..20: mol_type = genomic RNA
agacccaggaacaccctcca

SEQ ID NO: 554 - RNA, 20 nt, Homo sapiens
  source 1..20: mol_type = genomic RNA
gacccaggaacaccctccaa

SEQ ID NO: 555 - RNA, 20 nt, Homo sapiens
  source 1..20: mol_type = genomic RNA
acccaggaacaccctccaat

SEQ ID NO: 556 - RNA, 20 nt, Homo sapiens
  source 1..20: mol_type = genomic RNA
cccaggaacaccctccaatc

SEQ ID NO: 557 - RNA, 20 nt, Homo sapiens
  source 1..20: mol_type = genomic RNA
ccaggaacaccctccaatct

SEQ ID NO: 558 - RNA, 20 nt, Homo sapiens
  source 1..20: mol_type = genomic RNA
caggaacaccctccaatctc

SEQ ID NO: 559 - RNA, 20 nt, Homo sapiens
  source 1..20: mol_type = genomic RNA
aggaacaccctccaatctct

SEQ ID NO: 560 - RNA, 20 nt, Homo sapiens
  source 1..20: mol_type = genomic RNA
ggaacaccctccaatctctg

SEQ ID NO: 561 - RNA, 20 nt, Homo sapiens
  source 1..20: mol_type = genomic RNA
gaacaccctccaatctctgt

SEQ ID NO: 562 - RNA, 20 nt, Homo sapiens
  source 1..20: mol_type = genomic RNA
aacaccctccaatctctgtg

SEQ ID NO: 563 - RNA, 20 nt, Homo sapiens
  source 1..20: mol_type = genomic RNA
acaccctccaatctctgtgt

SEQ ID NO: 564 - RNA, 20 nt, Homo sapiens
  source 1..20: mol_type = genomic RNA
caccctccaatctctgtgtg

SEQ ID NO: 565 - RNA, 20 nt, Homo sapiens
  source 1..20: mol_type = genomic RNA
accctccaatctctgtgtgt

SEQ ID NO: 566 - RNA, 20 nt, Homo sapiens
  source 1..20: mol_type = genomic RNA
ccctccaatctctgtgtgtt

SEQ ID NO: 567 - RNA, 20 nt, Homo sapiens
  source 1..20: mol_type = genomic RNA
cctccaatctctgtgtgttt

SEQ ID NO: 568 - RNA, 20 nt, Homo sapiens
  source 1..20: mol_type = genomic RNA
ctccaatctctgtgtgtttt

SEQ ID NO: 569 - RNA, 20 nt, Homo sapiens
  source 1..20: mol_type = genomic RNA
tccaatctctgtgtgttttg

SEQ ID NO: 570 - RNA, 20 nt, Homo sapiens
  source 1..20: mol_type = genomic RNA
ccaatctctgtgtgttttgt

SEQ ID NO: 571 - RNA, 20 nt, Homo sapiens
  source 1..20: mol_type = genomic RNA
caatctctgtgtgttttgta

SEQ ID NO: 572 - RNA, 20 nt, Homo sapiens
  source 1..20: mol_type = genomic RNA
aatctctgtgtgttttgtaa

SEQ ID NO: 573 - RNA, 20 nt, Homo sapiens
  source 1..20: mol_type = genomic RNA
atctctgtgtgttttgtaaa

SEQ ID NO: 574 - RNA, 20 nt, Homo sapiens
  source 1..20: mol_type = genomic RNA
tctctgtgtgttttgtaaac

SEQ ID NO: 575 - RNA, 20 nt, Homo sapiens
  source 1..20: mol_type = genomic RNA
ctctgtgtgttttgtaaaca

SEQ ID NO: 576 - RNA, 20 nt, Homo sapiens
  source 1..20: mol_type = genomic RNA
tctgtgtgttttgtaaacat

SEQ ID NO: 577 - RNA, 20 nt, Homo sapiens
  source 1..20: mol_type = genomic RNA
ctgtgtgttttgtaaacatc

SEQ ID NO: 578 - RNA, 20 nt, Homo sapiens
  source 1..20: mol_type = genomic RNA
tgtgtgttttgtaaacatca

SEQ ID NO: 579 - RNA, 20 nt, Homo sapiens
  source 1..20: mol_type = genomic RNA
gtgtgttttgtaaacatcac

SEQ ID NO: 580 - RNA, 20 nt, Homo sapiens
  source 1..20: mol_type = genomic RNA
tgtgttttgtaaacatcact

SEQ ID NO: 581 - RNA, 20 nt, Homo sapiens
  source 1..20: mol_type = genomic RNA
gtgttttgtaaacatcactg

SEQ ID NO: 582 - RNA, 20 nt, Homo sapiens
  source 1..20: mol_type = genomic RNA
tgttttgtaaacatcactgg

SEQ ID NO: 583 - RNA, 20 nt, Homo sapiens
  source 1..20: mol_type = genomic RNA
gttttgtaaacatcactgga

SEQ ID NO: 584 - RNA, 20 nt, Homo sapiens
  source 1..20: mol_type = genomic RNA
ttttgtaaacatcactggag

SEQ ID NO: 585 - RNA, 20 nt, Homo sapiens
  source 1..20: mol_type = genomic RNA
tttgtaaacatcactggagg

SEQ ID NO: 586 - RNA, 20 nt, Homo sapiens
  source 1..20: mol_type = genomic RNA
ttgtaaacatcactggaggg

SEQ ID NO: 587 - RNA, 20 nt, Homo sapiens
  source 1..20: mol_type = genomic RNA
tgtaaacatcactggagggt

SEQ ID NO: 588 - RNA, 20 nt, Homo sapiens
  source 1..20: mol_type = genomic RNA
gtaaacatcactggagggtc

SEQ ID NO: 589 - RNA, 20 nt, Homo sapiens
  source 1..20: mol_type = genomic RNA
taaacatcactggagggtct

SEQ ID NO: 590 - RNA, 20 nt, Homo sapiens
  source 1..20: mol_type = genomic RNA
aaacatcactggagggtctt

SEQ ID NO: 591 - RNA, 20 nt, Homo sapiens
  source 1..20: mol_type = genomic RNA
aacatcactggagggtcttc

SEQ ID NO: 592 - RNA, 20 nt, Homo sapiens
  source 1..20: mol_type = genomic RNA
acatcactggagggtcttct

SEQ ID NO: 593 - RNA, 20 nt, Homo sapiens
  source 1..20: mol_type = genomic RNA
catcactggagggtcttcta

SEQ ID NO: 594 - RNA, 20 nt, Homo sapiens
  source 1..20: mol_type = genomic RNA
atcactggagggtcttctac

SEQ ID NO: 595 - RNA, 20 nt, Homo sapiens
  source 1..20: mol_type = genomic RNA
tcactggagggtcttctacg

SEQ ID NO: 596 - RNA, 20 nt, Homo sapiens
  source 1..20: mol_type = genomic RNA
cactggagggtcttctacgt

SEQ ID NO: 597 - RNA, 20 nt, Homo sapiens
  source 1..20: mol_type = genomic RNA
actggagggtcttctacgtg

SEQ ID NO: 598 - RNA, 20 nt, Homo sapiens
  source 1..20: mol_type = genomic RNA
ctggagggtcttctacgtga

SEQ ID NO: 599 - RNA, 20 nt, Homo sapiens
  source 1..20: mol_type = genomic RNA
tggagggtcttctacgtgag

SEQ ID NO: 600 - RNA, 20 nt, Homo sapiens
  source 1..20: mol_type = genomic RNA
ggagggtcttctacgtgagc

SEQ ID NO: 601 - RNA, 20 nt, Homo sapiens
  source 1..20: mol_type = genomic RNA
gagggtcttctacgtgagca

SEQ ID NO: 602 - RNA, 20 nt, Homo sapiens
  source 1..20: mol_type = genomic RNA
agggtcttctacgtgagcaa

SEQ ID NO: 603 - RNA, 20 nt, Homo sapiens
  source 1..20: mol_type = genomic RNA
gggtcttctacgtgagcaat

SEQ ID NO: 604 - RNA, 20 nt, Homo sapiens
  source 1..20: mol_type = genomic RNA
ggtcttctacgtgagcaatt

SEQ ID NO: 605 - RNA, 20 nt, Homo sapiens
  source 1..20: mol_type = genomic RNA
gtcttctacgtgagcaattg

SEQ ID NO: 606 - RNA, 20 nt, Homo sapiens
  source 1..20: mol_type = genomic RNA
tcttctacgtgagcaattgg

SEQ ID NO: 607 - RNA, 20 nt, Homo sapiens
  source 1..20: mol_type = genomic RNA
cttctacgtgagcaattgga

SEQ ID NO: 608 - RNA, 20 nt, Homo sapiens
  source 1..20: mol_type = genomic RNA
ttctacgtgagcaattggat

SEQ ID NO: 609 - RNA, 20 nt, Homo sapiens
  source 1..20: mol_type = genomic RNA
tctacgtgagcaattggatt

SEQ ID NO: 610 - RNA, 20 nt, Homo sapiens
  source 1..20: mol_type = genomic RNA
ctacgtgagcaattggattg

SEQ ID NO: 611 - RNA, 20 nt, Homo sapiens
  source 1..20: mol_type = genomic RNA
tacgtgagcaattggattgt

SEQ ID NO: 612 - RNA, 20 nt, Homo sapiens
  source 1..20: mol_type = genomic RNA
acgtgagcaattggattgtc

SEQ ID NO: 613 - RNA, 20 nt, Homo sapiens
  source 1..20: mol_type = genomic RNA
cgtgagcaattggattgtca

SEQ ID NO: 614 - RNA, 20 nt, Homo sapiens
  source 1..20: mol_type = genomic RNA
gtgagcaattggattgtcat

SEQ ID NO: 615 - RNA, 20 nt, Homo sapiens
  source 1..20: mol_type = genomic RNA
tgagcaattggattgtcatc

SEQ ID NO: 616 - RNA, 20 nt, Homo sapiens
  source 1..20: mol_type = genomic RNA
gagcaattggattgtcatca

SEQ ID NO: 617 - RNA, 20 nt, Homo sapiens
  source 1..20: mol_type = genomic RNA
agcaattggattgtcatcag

SEQ ID NO: 618 - RNA, 20 nt, Homo sapiens
  source 1..20: mol_type = genomic RNA
gcaattggattgtcatcagc

SEQ ID NO: 619 - RNA, 20 nt, Homo sapiens
  source 1..20: mol_type = genomic RNA
caattggattgtcatcagcc

SEQ ID NO: 620 - RNA, 20 nt, Homo sapiens
  source 1..20: mol_type = genomic RNA
aattggattgtcatcagccc

SEQ ID NO: 621 - RNA, 20 nt, Homo sapiens
  source 1..20: mol_type = genomic RNA
attggattgtcatcagccct

SEQ ID NO: 622 - RNA, 20 nt, Homo sapiens
  source 1..20: mol_type = genomic RNA
ttggattgtcatcagccctg

SEQ ID NO: 623 - RNA, 20 nt, Homo sapiens
  source 1..20: mol_type = genomic RNA
tggattgtcatcagccctgc

SEQ ID NO: 624 - RNA, 20 nt, Homo sapiens
  source 1..20: mol_type = genomic RNA
ggattgtcatcagccctgcc

SEQ ID NO: 625 - RNA, 20 nt, Homo sapiens
  source 1..20: mol_type = genomic RNA
gattgtcatcagccctgcct

SEQ ID NO: 626 - RNA, 20 nt, Homo sapiens
  source 1..20: mol_type = genomic RNA
attgtcatcagccctgcctg

SEQ ID NO: 627 - RNA, 20 nt, Homo sapiens
  source 1..20: mol_type = genomic RNA
ttgtcatcagccctgcctgt

SEQ ID NO: 628 - RNA, 20 nt, Homo sapiens
  source 1..20: mol_type = genomic RNA
tgtcatcagccctgcctgtt

SEQ ID NO: 629 - RNA, 20 nt, Homo sapiens
  source 1..20: mol_type = genomic RNA
gtcatcagccctgcctgttt

SEQ ID NO: 630 - RNA, 20 nt, Homo sapiens
  source 1..20: mol_type = genomic RNA
tcatcagccctgcctgtttt

SEQ ID NO: 631 - RNA, 20 nt, Homo sapiens
  source 1..20: mol_type = genomic RNA
catcagccctgcctgttttg

SEQ ID NO: 632 - RNA, 20 nt, Homo sapiens
  source 1..20: mol_type = genomic RNA
atcagccctgcctgttttgc

SEQ ID NO: 633 - RNA, 20 nt, Homo sapiens
  source 1..20: mol_type = genomic RNA
tcagccctgcctgttttgca

SEQ ID NO: 634 - RNA, 20 nt, Homo sapiens
  source 1..20: mol_type = genomic RNA
cagccctgcctgttttgcac

SEQ ID NO: 635 - RNA, 20 nt, Homo sapiens
  source 1..20: mol_type = genomic RNA
agccctgcctgttttgcacc

SEQ ID NO: 636 - RNA, 20 nt, Homo sapiens
  source 1..20: mol_type = genomic RNA
gccctgcctgttttgcacct

SEQ ID NO: 637 - RNA, 20 nt, Homo sapiens
  source 1..20: mol_type = genomic RNA
ccctgcctgttttgcacctg

SEQ ID NO: 638 - RNA, 20 nt, Homo sapiens
  source 1..20: mol_type = genomic RNA
cctgcctgttttgcacctgg

SEQ ID NO: 639 - RNA, 20 nt, Homo sapiens
  source 1..20: mol_type = genomic RNA
ctgcctgttttgcacctggg

SEQ ID NO: 640 - RNA, 20 nt, Homo sapiens
  source 1..20: mol_type = genomic RNA
tgcctgttttgcacctggga

SEQ ID NO: 641 - RNA, 20 nt, Homo sapiens
  source 1..20: mol_type = genomic RNA
gcctgttttgcacctgggaa

SEQ ID NO: 642 - RNA, 20 nt, Homo sapiens
  source 1..20: mol_type = genomic RNA
cctgttttgcacctgggaag

SEQ ID NO: 643 - RNA, 20 nt, Homo sapiens
  source 1..20: mol_type = genomic RNA
ctgttttgcacctgggaagt

SEQ ID NO: 644 - RNA, 20 nt, Homo sapiens
  source 1..20: mol_type = genomic RNA
tgttttgcacctgggaagtg

SEQ ID NO: 645 - RNA, 20 nt, Homo sapiens
  source 1..20: mol_type = genomic RNA
gttttgcacctgggaagtgc

SEQ ID NO: 646 - RNA, 20 nt, Homo sapiens
  source 1..20: mol_type = genomic RNA
ttttgcacctgggaagtgcc

SEQ ID NO: 647 - RNA, 20 nt, Homo sapiens
  source 1..20: mol_type = genomic RNA
tttgcacctgggaagtgccc

SEQ ID NO: 648 - RNA, 20 nt, Homo sapiens
  source 1..20: mol_type = genomic RNA
ttgcacctgggaagtgccct

SEQ ID NO: 649 - RNA, 20 nt, Homo sapiens
  source 1..20: mol_type = genomic RNA
tgcacctgggaagtgccctg

SEQ ID NO: 650 - RNA, 20 nt, Homo sapiens
  source 1..20: mol_type = genomic RNA
gcacctgggaagtgccctgg

SEQ ID NO: 651 - RNA, 20 nt, Homo sapiens
  source 1..20: mol_type = genomic RNA
cacctgggaagtgccctggt

SEQ ID NO: 652 - RNA, 20 nt, Homo sapiens
  source 1..20: mol_type = genomic RNA
acctgggaagtgccctggtc

SEQ ID NO: 653 - RNA, 20 nt, Homo sapiens
  source 1..20: mol_type = genomic RNA
cctgggaagtgccctggtct

SEQ ID NO: 654 - RNA, 20 nt, Homo sapiens
  source 1..20: mol_type = genomic RNA
ctgggaagtgccctggtctt

SEQ ID NO: 655 - RNA, 20 nt, Homo sapiens
  source 1..20: mol_type = genomic RNA
tgggaagtgccctggtctta

SEQ ID NO: 656 - RNA, 20 nt, Homo sapiens
  source 1..20: mol_type = genomic RNA
gggaagtgccctggtcttac

SEQ ID NO: 657 - RNA, 20 nt, Homo sapiens
  source 1..20: mol_type = genomic RNA
ggaagtgccctggtcttact

SEQ ID NO: 658 - RNA, 20 nt, Homo sapiens
  source 1..20: mol_type = genomic RNA
gaagtgccctggtcttactt

SEQ ID NO: 659 - RNA, 20 nt, Homo sapiens
  source 1..20: mol_type = genomic RNA
aagtgccctggtcttacttg

SEQ ID NO: 660 - RNA, 20 nt, Homo sapiens
  source 1..20: mol_type = genomic RNA
agtgccctggtcttacttgg

SEQ ID NO: 661 - RNA, 20 nt, Homo sapiens
  source 1..20: mol_type = genomic RNA
gtgccctggtcttacttggg

SEQ ID NO: 662 - RNA, 20 nt, Homo sapiens
  source 1..20: mol_type = genomic RNA
tgccctggtcttacttgggt

SEQ ID NO: 663 - RNA, 20 nt, Homo sapiens
  source 1..20: mol_type = genomic RNA
gccctggtcttacttgggtc

SEQ ID NO: 664 - RNA, 20 nt, Homo sapiens
  source 1..20: mol_type = genomic RNA
ccctggtcttacttgggtcc

SEQ ID NO: 665 - RNA, 20 nt, Homo sapiens
  source 1..20: mol_type = genomic RNA
cctggtcttacttgggtcca

SEQ ID NO: 666 - RNA, 20 nt, Homo sapiens
  source 1..20: mol_type = genomic RNA
ctggtcttacttgggtccaa

SEQ ID NO: 667 - RNA, 20 nt, Homo sapiens
  source 1..20: mol_type = genomic RNA
tggtcttacttgggtccaaa

SEQ ID NO: 668 - RNA, 20 nt, Homo sapiens
  source 1..20: mol_type = genomic RNA
ggtcttacttgggtccaaat

SEQ ID NO: 669 - RNA, 20 nt, Homo sapiens
  source 1..20: mol_type = genomic RNA
gtcttacttgggtccaaatt

SEQ ID NO: 670 - RNA, 20 nt, Homo sapiens
  source 1..20: mol_type = genomic RNA
tcttacttgggtccaaattg

SEQ ID NO: 671 - RNA, 20 nt, Homo sapiens
  source 1..20: mol_type = genomic RNA
cttacttgggtccaaattgt

SEQ ID NO: 672 - RNA, 20 nt, Homo sapiens
  source 1..20: mol_type = genomic RNA
ttacttgggtccaaattgtt

SEQ ID NO: 673 - RNA, 20 nt, Homo sapiens
  source 1..20: mol_type = genomic RNA
tacttgggtccaaattgttg

SEQ ID NO: 674 - RNA, 20 nt, Homo sapiens
  source 1..20: mol_type = genomic RNA
acttgggtccaaattgttgg

SEQ ID NO: 675 - RNA, 20 nt, Homo sapiens
  source 1..20: mol_type = genomic RNA
cttgggtccaaattgttggc

SEQ ID NO: 676 - RNA, 20 nt, Homo sapiens
  source 1..20: mol_type = genomic RNA
ttgggtccaaattgttggct

SEQ ID NO: 677 - RNA, 20 nt, Homo sapiens
  source 1..20: mol_type = genomic RNA
tgggtccaaattgttggctt

SEQ ID NO: 678 - RNA, 20 nt, Homo sapiens
  source 1..20: mol_type = genomic RNA
gggtccaaattgttggcttt

SEQ ID NO: 679 - RNA, 20 nt, Homo sapiens
  source 1..20: mol_type = genomic RNA
ggtccaaattgttggctttc

SEQ ID NO: 680 - RNA, 20 nt, Homo sapiens
  source 1..20: mol_type = genomic RNA
gtccaaattgttggctttca

SEQ ID NO: 681 - RNA, 20 nt, Homo sapiens
  source 1..20: mol_type = genomic RNA
tccaaattgttggctttcac

SEQ ID NO: 682 - RNA, 20 nt, Homo sapiens
  source 1..20: mol_type = genomic RNA
ccaaattgttggctttcact

SEQ ID NO: 683 - RNA, 20 nt, Homo sapiens
  source 1..20: mol_type = genomic RNA
caaattgttggctttcactt

SEQ ID NO: 684 - RNA, 20 nt, Homo sapiens
  source 1..20: mol_type = genomic RNA
aaattgttggctttcacttt

SEQ ID NO: 685 - RNA, 20 nt, Homo sapiens
  source 1..20: mol_type = genomic RNA
aattgttggctttcactttt

SEQ ID NO: 686 - RNA, 20 nt, Homo sapiens
  source 1..20: mol_type = genomic RNA
attgttggctttcacttttg

SEQ ID NO: 687 - RNA, 20 nt, Homo sapiens
  source 1..20: mol_type = genomic RNA
ttgttggctttcacttttga

SEQ ID NO: 688 - RNA, 20 nt, Homo sapiens
  source 1..20: mol_type = genomic RNA
tgttggctttcacttttgac

SEQ ID NO: 689 - RNA, 20 nt, Homo sapiens
  source 1..20: mol_type = genomic RNA
gttggctttcacttttgacc

SEQ ID NO: 690 - RNA, 20 nt, Homo sapiens
  source 1..20: mol_type = genomic RNA
ttggctttcacttttgaccc

SEQ ID NO: 691 - RNA, 20 nt, Homo sapiens
  source 1..20: mol_type = genomic RNA
tggctttcacttttgaccct

SEQ ID NO: 692 - RNA, 20 nt, Homo sapiens
  source 1..20: mol_type = genomic RNA
ggctttcacttttgacccta

SEQ ID NO: 693 - RNA, 20 nt, Homo sapiens
  source 1..20: mol_type = genomic RNA
gctttcacttttgaccctaa

SEQ ID NO: 694 - RNA, 20 nt, Homo sapiens
  source 1..20: mol_type = genomic RNA
ctttcacttttgaccctaag

SEQ ID NO: 695 - RNA, 20 nt, Homo sapiens
  source 1..20: mol_type = genomic RNA
tttcacttttgaccctaagc

SEQ ID NO: 696 - RNA, 20 nt, Homo sapiens
  source 1..20: mol_type = genomic RNA
ttcacttttgaccctaagca

SEQ ID NO: 697 - RNA, 20 nt, Homo sapiens
  source 1..20: mol_type = genomic RNA
tcacttttgaccctaagcat

SEQ ID NO: 698 - RNA, 20 nt, Homo sapiens
  source 1..20: mol_type = genomic RNA
cacttttgaccctaagcatc

SEQ ID NO: 699 - RNA, 20 nt, Homo sapiens
  source 1..20: mol_type = genomic RNA
acttttgaccctaagcatct

SEQ ID NO: 700 - RNA, 20 nt, Homo sapiens
  source 1..20: mol_type = genomic RNA
cttttgaccctaagcatctg

SEQ ID NO: 701 - RNA, 20 nt, Homo sapiens
  source 1..20: mol_type = genomic RNA
ttttgaccctaagcatctga

SEQ ID NO: 702 - RNA, 20 nt, Homo sapiens
  source 1..20: mol_type = genomic RNA
tttgaccctaagcatctgaa

SEQ ID NO: 703 - RNA, 20 nt, Homo sapiens
  source 1..20: mol_type = genomic RNA
ttgaccctaagcatctgaag

SEQ ID NO: 704 - RNA, 20 nt, Homo sapiens
  source 1..20: mol_type = genomic RNA
tgaccctaagcatctgaagc

SEQ ID NO: 705 - RNA, 20 nt, Homo sapiens
  source 1..20: mol_type = genomic RNA
gaccctaagcatctgaagcc

SEQ ID NO: 706 - RNA, 20 nt, Homo sapiens
  source 1..20: mol_type = genomic RNA
accctaagcatctgaagcca

SEQ ID NO: 707 - RNA, 20 nt, Homo sapiens
  source 1..20: mol_type = genomic RNA
ccctaagcatctgaagccat

SEQ ID NO: 708 - RNA, 20 nt, Homo sapiens
  source 1..20: mol_type = genomic RNA
cctaagcatctgaagccatg

SEQ ID NO: 709 - RNA, 20 nt, Homo sapiens
  source 1..20: mol_type = genomic RNA
ctaagcatctgaagccatgg

SEQ ID NO: 710 - RNA, 20 nt, Homo sapiens
  source 1..20: mol_type = genomic RNA
taagcatctgaagccatggg

SEQ ID NO: 711 - RNA, 20 nt, Homo sapiens
  source 1..20: mol_type = genomic RNA
aagcatctgaagccatgggc

SEQ ID NO: 712 - RNA, 20 nt, Homo sapiens
  source 1..20: mol_type = genomic RNA
agcatctgaagccatgggcc

SEQ ID NO: 713 - RNA, 20 nt, Homo sapiens
  source 1..20: mol_type = genomic RNA
gcatctgaagccatgggcca

SEQ ID NO: 714 - RNA, 20 nt, Homo sapiens
  source 1..20: mol_type = genomic RNA
catctgaagccatgggccac

SEQ ID NO: 715 - RNA, 20 nt, Homo sapiens
  source 1..20: mol_type = genomic RNA
atctgaagccatgggccaca

SEQ ID NO: 716 - RNA, 20 nt, Homo sapiens
  source 1..20: mol_type = genomic RNA
tctgaagccatgggccacac

SEQ ID NO: 717 - RNA, 20 nt, Homo sapiens
  source 1..20: mol_type = genomic RNA
ctgaagccatgggccacaca

SEQ ID NO: 718 - RNA, 20 nt, Homo sapiens
  source 1..20: mol_type = genomic RNA
tgaagccatgggccacacac

SEQ ID NO: 719 - RNA, 20 nt, Homo sapiens
  source 1..20: mol_type = genomic RNA
gaagccatgggccacacacg

SEQ ID NO: 720 - RNA, 20 nt, Homo sapiens
  source 1..20: mol_type = genomic RNA
aagccatgggccacacacgg

SEQ ID NO: 721 - RNA, 20 nt, Homo sapiens
  source 1..20: mol_type = genomic RNA
agccatgggccacacacgga

SEQ ID NO: 722 - RNA, 20 nt, Homo sapiens
  source 1..20: mol_type = genomic RNA
gccatgggccacacacggag

SEQ ID NO: 723 - RNA, 20 nt, Homo sapiens
  source 1..20: mol_type = genomic RNA
ccatgggccacacacggagg

SEQ ID NO: 724 - RNA, 20 nt, Homo sapiens
  source 1..20: mol_type = genomic RNA
catgggccacacacggaggc

SEQ ID NO: 725 - RNA, 20 nt, Homo sapiens
  source 1..20: mol_type = genomic RNA
atgggccacacacggaggca

SEQ ID NO: 726 - RNA, 20 nt, Homo sapiens
  source 1..20: mol_type = genomic RNA
tgggccacacacggaggcag

SEQ ID NO: 727 - RNA, 20 nt, Homo sapiens
  source 1..20: mol_type = genomic RNA
gggccacacacggaggcagg

SEQ ID NO: 728 - RNA, 20 nt, Homo sapiens
  source 1..20: mol_type = genomic RNA
ggccacacacggaggcaggg

SEQ ID NO: 729 - RNA, 20 nt, Homo sapiens
  source 1..20: mol_type = genomic RNA
gccacacacggaggcaggga

SEQ ID NO: 730 - RNA, 20 nt, Homo sapiens
  source 1..20: mol_type = genomic RNA
ccacacacggaggcagggaa

SEQ ID NO: 731 - RNA, 20 nt, Homo sapiens
  source 1..20: mol_type = genomic RNA
cacacacggaggcagggaac

SEQ ID NO: 732 - RNA, 20 nt, Homo sapiens
  source 1..20: mol_type = genomic RNA
acacacggaggcagggaaca

SEQ ID NO: 733 - RNA, 20 nt, Homo sapiens
  source 1..20: mol_type = genomic RNA
cacacggaggcagggaacat

SEQ ID NO: 734 - RNA, 20 nt, Homo sapiens
  source 1..20: mol_type = genomic RNA
acacggaggcagggaacatc

SEQ ID NO: 735 - RNA, 20 nt, Homo sapiens
  source 1..20: mol_type = genomic RNA
cacggaggcagggaacatca

SEQ ID NO: 736 - RNA, 20 nt, Homo sapiens
  source 1..20: mol_type = genomic RNA
acggaggcagggaacatcac

SEQ ID NO: 737 - RNA, 20 nt, Homo sapiens
  source 1..20: mol_type = genomic RNA
cggaggcagggaacatcacc

SEQ ID NO: 738 - RNA, 20 nt, Homo sapiens
  source 1..20: mol_type = genomic RNA
ggaggcagggaacatcacca

SEQ ID NO: 739 - RNA, 20 nt, Homo sapiens
  source 1..20: mol_type = genomic RNA
gaggcagggaacatcaccat

SEQ ID NO: 740 - RNA, 20 nt, Homo sapiens
  source 1..20: mol_type = genomic RNA
aggcagggaacatcaccatc

SEQ ID NO: 741 - RNA, 20 nt, Homo sapiens
  source 1..20: mol_type = genomic RNA
ggcagggaacatcaccatcc

SEQ ID NO: 742 - RNA, 20 nt, Homo sapiens
  source 1..20: mol_type = genomic RNA
gcagggaacatcaccatcca

SEQ ID NO: 743 - RNA, 20 nt, Homo sapiens
  source 1..20: mol_type = genomic RNA
cagggaacatcaccatccaa

SEQ ID NO: 744 - RNA, 20 nt, Homo sapiens
  source 1..20: mol_type = genomic RNA
agggaacatcaccatccaag

SEQ ID NO: 745 - RNA, 20 nt, Homo sapiens
  source 1..20: mol_type = genomic RNA
gggaacatcaccatccaagt

SEQ ID NO: 746 - RNA, 20 nt, Homo sapiens
  source 1..20: mol_type = genomic RNA
ggaacatcaccatccaagtg

SEQ ID NO: 747 - RNA, 20 nt, Homo sapiens
  source 1..20: mol_type = genomic RNA
gaacatcaccatccaagtgt

SEQ ID NO: 748 - RNA, 20 nt, Homo sapiens
  source 1..20: mol_type = genomic RNA
aacatcaccatccaagtgtc

SEQ ID NO: 749 - RNA, 20 nt, Homo sapiens
  source 1..20: mol_type = genomic RNA
acatcaccatccaagtgtcc

SEQ ID NO: 750 - RNA, 20 nt, Homo sapiens
  source 1..20: mol_type = genomic RNA
catcaccatccaagtgtcca

SEQ ID NO: 751 - RNA, 20 nt, Homo sapiens
  source 1..20: mol_type = genomic RNA
atcaccatccaagtgtccat

SEQ ID NO: 752 - RNA, 20 nt, Homo sapiens
  source 1..20: mol_type = genomic RNA
tcaccatccaagtgtccata

SEQ ID NO: 753 - RNA, 20 nt, Homo sapiens
  source 1..20: mol_type = genomic RNA
caccatccaagtgtccatac

SEQ ID NO: 754 - RNA, 20 nt, Homo sapiens
  source 1..20: mol_type = genomic RNA
accatccaagtgtccatacc

SEQ ID NO: 755 - RNA, 20 nt, Homo sapiens
  source 1..20: mol_type = genomic RNA
ccatccaagtgtccatacct

SEQ ID NO: 756 - RNA, 20 nt, Homo sapiens
  source 1..20: mol_type = genomic RNA
catccaagtgtccatacctc

SEQ ID NO: 757 - RNA, 20 nt, Homo sapiens
  source 1..20: mol_type = genomic RNA
atccaagtgtccatacctca

SEQ ID NO: 758 - RNA, 20 nt, Homo sapiens
  source 1..20: mol_type = genomic RNA
tccaagtgtccatacctcaa

SEQ ID NO: 759 - RNA, 20 nt, Homo sapiens
  source 1..20: mol_type = genomic RNA
ccaagtgtccatacctcaat

SEQ ID NO: 760 - RNA, 20 nt, Homo sapiens
  source 1..20: mol_type = genomic RNA
caagtgtccatacctcaatt

SEQ ID NO: 761 - RNA, 20 nt, Homo sapiens
  source 1..20: mol_type = genomic RNA
aagtgtccatacctcaattt

SEQ ID NO: 762 - RNA, 20 nt, Homo sapiens
  source 1..20: mol_type = genomic RNA
agtgtccatacctcaatttc

SEQ ID NO: 763 - RNA, 20 nt, Homo sapiens
  source 1..20: mol_type = genomic RNA
gtgtccatacctcaatttct

SEQ ID NO: 764 - RNA, 20 nt, Homo sapiens
  source 1..20: mol_type = genomic RNA
tgtccatacctcaatttctt

SEQ ID NO: 765 - RNA, 20 nt, Homo sapiens
  source 1..20: mol_type = genomic RNA
gtccatacctcaatttcttt

SEQ ID NO: 766 - RNA, 20 nt, Homo sapiens
  source 1..20: mol_type = genomic RNA
tccatacctcaatttctttc

SEQ ID NO: 767 - RNA, 20 nt, Homo sapiens
  source 1..20: mol_type = genomic RNA
ccatacctcaatttctttca

SEQ ID NO: 768 - RNA, 20 nt, Homo sapiens
  source 1..20: mol_type = genomic RNA
catacctcaatttctttcag

SEQ ID NO: 769 - RNA, 20 nt, Homo sapiens
  source 1..20: mol_type = genomic RNA
atacctcaatttctttcagc

SEQ ID NO: 770 - RNA, 20 nt, Homo sapiens
  source 1..20: mol_type = genomic RNA
tacctcaatttctttcagct

SEQ ID NO: 771 - RNA, 20 nt, Homo sapiens
  source 1..20: mol_type = genomic RNA
acctcaatttctttcagctc

SEQ ID NO: 772 - RNA, 20 nt, Homo sapiens
  source 1..20: mol_type = genomic RNA
cctcaatttctttcagctct

SEQ ID NO: 773 - RNA, 20 nt, Homo sapiens
  source 1..20: mol_type = genomic RNA
ctcaatttctttcagctctt

SEQ ID NO: 774 - RNA, 20 nt, Homo sapiens
  source 1..20: mol_type = genomic RNA
tcaatttctttcagctcttg

SEQ ID NO: 775 - RNA, 20 nt, Homo sapiens
  source 1..20: mol_type = genomic RNA
caatttctttcagctcttgg

SEQ ID NO: 776 - RNA, 20 nt, Homo sapiens
  source 1..20: mol_type = genomic RNA
aatttctttcagctcttggt

SEQ ID NO: 777 - RNA, 20 nt, Homo sapiens
  source 1..20: mol_type = genomic RNA
atttctttcagctcttggtg

SEQ ID NO: 778 - RNA, 20 nt, Homo sapiens
  source 1..20: mol_type = genomic RNA
tttctttcagctcttggtgc

SEQ ID NO: 779 - RNA, 20 nt, Homo sapiens
  source 1..20: mol_type = genomic RNA
ttctttcagctcttggtgct

SEQ ID NO: 780 - RNA, 20 nt, Homo sapiens
  source 1..20: mol_type = genomic RNA
tctttcagctcttggtgctg

SEQ ID NO: 781 - RNA, 20 nt, Homo sapiens
  source 1..20: mol_type = genomic RNA
ctttcagctcttggtgctgg

SEQ ID NO: 782 - RNA, 20 nt, Homo sapiens
  source 1..20: mol_type = genomic RNA
tttcagctcttggtgctggc

SEQ ID NO: 783 - RNA, 20 nt, Homo sapiens
  source 1..20: mol_type = genomic RNA
ttcagctcttggtgctggct

SEQ ID NO: 784 - RNA, 20 nt, Homo sapiens
  source 1..20: mol_type = genomic RNA
tcagctcttggtgctggctg

SEQ ID NO: 785 - RNA, 20 nt, Homo sapiens
  source 1..20: mol_type = genomic RNA
cagctcttggtgctggctgg

SEQ ID NO: 786 - RNA, 20 nt, Homo sapiens
  source 1..20: mol_type = genomic RNA
agctcttggtgctggctggt

SEQ ID NO: 787 - RNA, 20 nt, Homo sapiens
  source 1..20: mol_type = genomic RNA
gctcttggtgctggctggtc

SEQ ID NO: 788 - RNA, 20 nt, Homo sapiens
  source 1..20: mol_type = genomic RNA
ctcttggtgctggctggtct

SEQ ID NO: 789 - RNA, 20 nt, Homo sapiens
  source 1..20: mol_type = genomic RNA
tcttggtgctggctggtctt

SEQ ID NO: 790 - RNA, 20 nt, Homo sapiens
  source 1..20: mol_type = genomic RNA
cttggtgctggctggtcttt

SEQ ID NO: 791 - RNA, 20 nt, Homo sapiens
  source 1..20: mol_type = genomic RNA
ttggtgctggctggtctttc

SEQ ID NO: 792 - RNA, 20 nt, Homo sapiens
  source 1..20: mol_type = genomic RNA
tggtgctggctggtctttct

SEQ ID NO: 793 - RNA, 20 nt, Homo sapiens
  source 1..20: mol_type = genomic RNA
ggtgctggctggtctttctc

SEQ ID NO: 794 - RNA, 20 nt, Homo sapiens
  source 1..20: mol_type = genomic RNA
gtgctggctggtctttctca

SEQ ID NO: 795 - RNA, 20 nt, Homo sapiens
  source 1..20: mol_type = genomic RNA
tgctggctggtctttctcac

SEQ ID NO: 796 - RNA, 20 nt, Homo sapiens
  source 1..20: mol_type = genomic RNA
gctggctggtctttctcact

SEQ ID NO: 797 - RNA, 20 nt, Homo sapiens
  source 1..20: mol_type = genomic RNA
ctggctggtctttctcactt

SEQ ID NO: 798 - RNA, 20 nt, Homo sapiens
  source 1..20: mol_type = genomic RNA
tggctggtctttctcacttc

SEQ ID NO: 799 - RNA, 20 nt, Homo sapiens
  source 1..20: mol_type = genomic RNA
ggctggtctttctcacttct

SEQ ID NO: 800 - RNA, 20 nt, Homo sapiens
  source 1..20: mol_type = genomic RNA
gctggtctttctcacttctg

SEQ ID NO: 801 - RNA, 20 nt, Homo sapiens
  source 1..20: mol_type = genomic RNA
ctggtctttctcacttctgt

SEQ ID NO: 802 - RNA, 20 nt, Homo sapiens
  source 1..20: mol_type = genomic RNA
tggtctttctcacttctgtt

SEQ ID NO: 803 - RNA, 20 nt, Homo sapiens
  source 1..20: mol_type = genomic RNA
ggtctttctcacttctgttc

SEQ ID NO: 804 - RNA, 20 nt, Homo sapiens
  source 1..20: mol_type = genomic RNA
gtctttctcacttctgttca

SEQ ID NO: 805 - RNA, 20 nt, Homo sapiens
  source 1..20: mol_type = genomic RNA
tctttctcacttctgttcag

SEQ ID NO: 806 - RNA, 20 nt, Homo sapiens
  source 1..20: mol_type = genomic RNA
ctttctcacttctgttcagg

SEQ ID NO: 807 - RNA, 20 nt, Homo sapiens
  source 1..20: mol_type = genomic RNA
tttctcacttctgttcaggt

SEQ ID NO: 808 - RNA, 20 nt, Homo sapiens
  source 1..20: mol_type = genomic RNA
ttctcacttctgttcaggtg

SEQ ID NO: 809 - RNA, 20 nt, Homo sapiens
  source 1..20: mol_type = genomic RNA
tctcacttctgttcaggtgt

SEQ ID NO: 810 - RNA, 20 nt, Homo sapiens
  source 1..20: mol_type = genomic RNA
ctcacttctgttcaggtgtt

SEQ ID NO: 811 - RNA, 20 nt, Homo sapiens
  source 1..20: mol_type = genomic RNA
tcacttctgttcaggtgtta

SEQ ID NO: 812 - RNA, 20 nt, Homo sapiens
  source 1..20: mol_type = genomic RNA
cacttctgttcaggtgttat

SEQ ID NO: 813 - RNA, 20 nt, Homo sapiens
  source 1..20: mol_type = genomic RNA
acttctgttcaggtgttatc

SEQ ID NO: 814 - RNA, 20 nt, Homo sapiens
  source 1..20: mol_type = genomic RNA
cttctgttcaggtgttatcc

SEQ ID NO: 815 - RNA, 20 nt, Homo sapiens
  source 1..20: mol_type = genomic RNA
ttctgttcaggtgttatcca

SEQ ID NO: 816 - RNA, 20 nt, Homo sapiens
  source 1..20: mol_type = genomic RNA
tctgttcaggtgttatccac

SEQ ID NO: 817 - RNA, 20 nt, Homo sapiens
  source 1..20: mol_type = genomic RNA
ctgttcaggtgttatccacg

SEQ ID NO: 818 - RNA, 20 nt, Homo sapiens
  source 1..20: mol_type = genomic RNA
tgttcaggtgttatccacgt

SEQ ID NO: 819 - RNA, 20 nt, Homo sapiens
  source 1..20: mol_type = genomic RNA
gttcaggtgttatccacgtg

SEQ ID NO: 820 - RNA, 20 nt, Homo sapiens
  source 1..20: mol_type = genomic RNA
ttcaggtgttatccacgtga

SEQ ID NO: 821 - RNA, 20 nt, Homo sapiens
  source 1..20: mol_type = genomic RNA
tcaggtgttatccacgtgac

SEQ ID NO: 822 - RNA, 20 nt, Homo sapiens
  source 1..20: mol_type = genomic RNA
caggtgttatccacgtgacc

SEQ ID NO: 823 - RNA, 20 nt, Homo sapiens
  source 1..20: mol_type = genomic RNA
aggtgttatccacgtgacca

SEQ ID NO: 824 - RNA, 20 nt, Homo sapiens
  source 1..20: mol_type = genomic RNA
ggtgttatccacgtgaccaa

SEQ ID NO: 825 - RNA, 20 nt, Homo sapiens
  source 1..20: mol_type = genomic RNA
gtgttatccacgtgaccaag

SEQ ID NO: 826 - RNA, 20 nt, Homo sapiens
  source 1..20: mol_type = genomic RNA
tgttatccacgtgaccaagg

SEQ ID NO: 827 - RNA, 20 nt, Homo sapiens
  source 1..20: mol_type = genomic RNA
gttatccacgtgaccaagga

SEQ ID NO: 828 - RNA, 20 nt, Homo sapiens
  source 1..20: mol_type = genomic RNA
ttatccacgtgaccaaggaa

SEQ ID NO: 829 - RNA, 20 nt, Homo sapiens
  source 1..20: mol_type = genomic RNA
tatccacgtgaccaaggaag

SEQ ID NO: 830 - RNA, 20 nt, Homo sapiens
  source 1..20: mol_type = genomic RNA
atccacgtgaccaaggaagt

SEQ ID NO: 831 - RNA, 20 nt, Homo sapiens
  source 1..20: mol_type = genomic RNA
tccacgtgaccaaggaagtg

SEQ ID NO: 832 - RNA, 20 nt, Homo sapiens
  source 1..20: mol_type = genomic RNA
ccacgtgaccaaggaagtga

SEQ ID NO: 833 - RNA, 20 nt, Homo sapiens
  source 1..20: mol_type = genomic RNA
cacgtgaccaaggaagtgaa

SEQ ID NO: 834 - RNA, 20 nt, Homo sapiens
  source 1..20: mol_type = genomic RNA
acgtgaccaaggaagtgaaa

SEQ ID NO: 835 - RNA, 20 nt, Homo sapiens
  source 1..20: mol_type = genomic RNA
cgtgaccaaggaagtgaaag

SEQ ID NO: 836 - RNA, 20 nt, Homo sapiens
  source 1..20: mol_type = genomic RNA
gtgaccaaggaagtgaaaga

SEQ ID NO: 837 - RNA, 20 nt, Homo sapiens
  source 1..20: mol_type = genomic RNA
tgaccaaggaagtgaaagaa

SEQ ID NO: 838 - RNA, 20 nt, Homo sapiens
  source 1..20: mol_type = genomic RNA
gaccaaggaagtgaaagaag

SEQ ID NO: 839 - RNA, 20 nt, Homo sapiens
  source 1..20: mol_type = genomic RNA
accaaggaagtgaaagaagt

SEQ ID NO: 840 - RNA, 20 nt, Homo sapiens
  source 1..20: mol_type = genomic RNA
ccaaggaagtgaaagaagtg

SEQ ID NO: 841 - RNA, 20 nt, Homo sapiens
  source 1..20: mol_type = genomic RNA
caaggaagtgaaagaagtgg

SEQ ID NO: 842 - RNA, 20 nt, Homo sapiens
  source 1..20: mol_type = genomic RNA
aaggaagtgaaagaagtggc

SEQ ID NO: 843 - RNA, 20 nt, Homo sapiens
  source 1..20: mol_type = genomic RNA
aggaagtgaaagaagtggca

SEQ ID NO: 844 - RNA, 20 nt, Homo sapiens
  source 1..20: mol_type = genomic RNA
ggaagtgaaagaagtggcaa

SEQ ID NO: 845 - RNA, 20 nt, Homo sapiens
  source 1..20: mol_type = genomic RNA
gaagtgaaagaagtggcaac

SEQ ID NO: 846 - RNA, 20 nt, Homo sapiens
  source 1..20: mol_type = genomic RNA
aagtgaaagaagtggcaacg

SEQ ID NO: 847 - RNA, 20 nt, Homo sapiens
  source 1..20: mol_type = genomic RNA
agtgaaagaagtggcaacgc

SEQ ID NO: 848 - RNA, 20 nt, Homo sapiens
  source 1..20: mol_type = genomic RNA
gtgaaagaagtggcaacgct

SEQ ID NO: 849 - RNA, 20 nt, Homo sapiens
  source 1..20: mol_type = genomic RNA
tgaaagaagtggcaacgctg

SEQ ID NO: 850 - RNA, 20 nt, Homo sapiens
  source 1..20: mol_type = genomic RNA
gaaagaagtggcaacgctgt

SEQ ID NO: 851 - RNA, 20 nt, Homo sapiens
  source 1..20: mol_type = genomic RNA
aaagaagtggcaacgctgtc

SEQ ID NO: 852 - RNA, 20 nt, Homo sapiens
  source 1..20: mol_type = genomic RNA
aagaagtggcaacgctgtcc

SEQ ID NO: 853 - RNA, 20 nt, Homo sapiens
  source 1..20: mol_type = genomic RNA
agaagtggcaacgctgtcct

SEQ ID NO: 854 - RNA, 20 nt, Homo sapiens
  source 1..20: mol_type = genomic RNA
gaagtggcaacgctgtcctg

SEQ ID NO: 855 - RNA, 20 nt, Homo sapiens
  source 1..20: mol_type = genomic RNA
aagtggcaacgctgtcctgt

SEQ ID NO: 856 - RNA, 20 nt, Homo sapiens
  source 1..20: mol_type = genomic RNA
agtggcaacgctgtcctgtg

SEQ ID NO: 857 - RNA, 20 nt, Homo sapiens
  source 1..20: mol_type = genomic RNA
gtggcaacgctgtcctgtgg

SEQ ID NO: 858 - RNA, 20 nt, Homo sapiens
  source 1..20: mol_type = genomic RNA
tggcaacgctgtcctgtggt

SEQ ID NO: 859 - RNA, 20 nt, Homo sapiens
  source 1..20: mol_type = genomic RNA
ggcaacgctgtcctgtggtc

SEQ ID NO: 860 - RNA, 20 nt, Homo sapiens
  source 1..20: mol_type = genomic RNA
gcaacgctgtcctgtggtca

SEQ ID NO: 861 - RNA, 20 nt, Homo sapiens
  source 1..20: mol_type = genomic RNA
caacgctgtcctgtggtcac

SEQ ID NO: 862 - RNA, 20 nt, Homo sapiens
  source 1..20: mol_type = genomic RNA
aacgctgtcctgtggtcaca

SEQ ID NO: 863 - RNA, 20 nt, Homo sapiens
  source 1..20: mol_type = genomic RNA
acgctgtcctgtggtcacaa

SEQ ID NO: 864 - RNA, 20 nt, Homo sapiens
  source 1..20: mol_type = genomic RNA
cgctgtcctgtggtcacaat

SEQ ID NO: 865 - RNA, 20 nt, Homo sapiens
  source 1..20: mol_type = genomic RNA
gctgtcctgtggtcacaatg

SEQ ID NO: 866 - RNA, 20 nt, Homo sapiens
  source 1..20: mol_type = genomic RNA
ctgtcctgtggtcacaatgt

SEQ ID NO: 867 - RNA, 20 nt, Homo sapiens
  source 1..20: mol_type = genomic RNA
tgtcctgtggtcacaatgtt

SEQ ID NO: 868 - RNA, 20 nt, Homo sapiens
  source 1..20: mol_type = genomic RNA
gtcctgtggtcacaatgttt

SEQ ID NO: 869 - RNA, 20 nt, Homo sapiens
  source 1..20: mol_type = genomic RNA
tcctgtggtcacaatgtttc

SEQ ID NO: 870 - RNA, 20 nt, Homo sapiens
  source 1..20: mol_type = genomic RNA
cctgtggtcacaatgtttct

SEQ ID NO: 871 - RNA, 20 nt, Homo sapiens
  source 1..20: mol_type = genomic RNA
ctgtggtcacaatgtttctg

SEQ ID NO: 872 - RNA, 20 nt, Homo sapiens
  source 1..20: mol_type = genomic RNA
tgtggtcacaatgtttctgt

SEQ ID NO: 873 - RNA, 20 nt, Homo sapiens
  source 1..20: mol_type = genomic RNA
gtggtcacaatgtttctgtt

SEQ ID NO: 874 - RNA, 20 nt, Homo sapiens
  source 1..20: mol_type = genomic RNA
tggtcacaatgtttctgttg

SEQ ID NO: 875 - RNA, 20 nt, Homo sapiens
  source 1..20: mol_type = genomic RNA
ggtcacaatgtttctgttga

SEQ ID NO: 876 - RNA, 20 nt, Homo sapiens
  source 1..20: mol_type = genomic RNA
gtcacaatgtttctgttgaa

SEQ ID NO: 877 - RNA, 20 nt, Homo sapiens
  source 1..20: mol_type = genomic RNA
tcacaatgtttctgttgaag

SEQ ID NO: 878 - RNA, 20 nt, Homo sapiens
  source 1..20: mol_type = genomic RNA
cacaatgtttctgttgaaga

SEQ ID NO: 879 - RNA, 20 nt, Homo sapiens
  source 1..20: mol_type = genomic RNA
acaatgtttctgttgaagag

SEQ ID NO: 880 - RNA, 20 nt, Homo sapiens
  source 1..20: mol_type = genomic RNA
caatgtttctgttgaagagc

SEQ ID NO: 881 - RNA, 20 nt, Homo sapiens
  source 1..20: mol_type = genomic RNA
aatgtttctgttgaagagct

SEQ ID NO: 882 - RNA, 20 nt, Homo sapiens
  source 1..20: mol_type = genomic RNA
atgtttctgttgaagagctg

SEQ ID NO: 883 - RNA, 20 nt, Homo sapiens
  source 1..20: mol_type = genomic RNA
tgtttctgttgaagagctgg

SEQ ID NO: 884 - RNA, 20 nt, Homo sapiens
  source 1..20: mol_type = genomic RNA
gtttctgttgaagagctggc

SEQ ID NO: 885 - RNA, 20 nt, Homo sapiens
  source 1..20: mol_type = genomic RNA
tttctgttgaagagctggca

SEQ ID NO: 886 - RNA, 20 nt, Homo sapiens
  source 1..20: mol_type = genomic RNA
ttctgttgaagagctggcac

SEQ ID NO: 887 - RNA, 20 nt, Homo sapiens
  source 1..20: mol_type = genomic RNA
tctgttgaagagctggcaca

SEQ ID NO: 888 - RNA, 20 nt, Homo sapiens
  source 1..20: mol_type = genomic RNA
ctgttgaagagctggcacaa

SEQ ID NO: 889 - RNA, 20 nt, Homo sapiens
  source 1..20: mol_type = genomic RNA
tgttgaagagctggcacaaa

SEQ ID NO: 890 - RNA, 20 nt, Homo sapiens
  source 1..20: mol_type = genomic RNA
gttgaagagctggcacaaac

SEQ ID NO: 891 - RNA, 20 nt, Homo sapiens
  source 1..20: mol_type = genomic RNA
ttgaagagctggcacaaact

SEQ ID NO: 892 - RNA, 20 nt, Homo sapiens
  source 1..20: mol_type = genomic RNA
tgaagagctggcacaaactc

SEQ ID NO: 893 - RNA, 20 nt, Homo sapiens
  source 1..20: mol_type = genomic RNA
gaagagctggcacaaactcg

SEQ ID NO: 894 - RNA, 20 nt, Homo sapiens
  source 1..20: mol_type = genomic RNA
aagagctggcacaaactcgc

SEQ ID NO: 895 - RNA, 20 nt, Homo sapiens
  source 1..20: mol_type = genomic RNA
agagctggcacaaactcgca

SEQ ID NO: 896 - RNA, 20 nt, Homo sapiens
  source 1..20: mol_type = genomic RNA
gagctggcacaaactcgcat

SEQ ID NO: 897 - RNA, 20 nt, Homo sapiens
  source 1..20: mol_type = genomic RNA
agctggcacaaactcgcatc

SEQ ID NO: 898 - RNA, 20 nt, Homo sapiens
  source 1..20: mol_type = genomic RNA
gctggcacaaactcgcatct

SEQ ID NO: 899 - RNA, 20 nt, Homo sapiens
  source 1..20: mol_type = genomic RNA
ctggcacaaactcgcatcta

SEQ ID NO: 900 - RNA, 20 nt, Homo sapiens
  source 1..20: mol_type = genomic RNA
tggcacaaactcgcatctac

SEQ ID NO: 901 - RNA, 20 nt, Homo sapiens
  source 1..20: mol_type = genomic RNA
ggcacaaactcgcatctact

SEQ ID NO: 902 - RNA, 20 nt, Homo sapiens
  source 1..20: mol_type = genomic RNA
gcacaaactcgcatctactg

SEQ ID NO: 903 - RNA, 20 nt, Homo sapiens
  source 1..20: mol_type = genomic RNA
cacaaactcgcatctactgg

SEQ ID NO: 904 - RNA, 20 nt, Homo sapiens
  source 1..20: mol_type = genomic RNA
acaaactcgcatctactggc

SEQ ID NO: 905 - RNA, 20 nt, Homo sapiens
  source 1..20: mol_type = genomic RNA
caaactcgcatctactggca

SEQ ID NO: 906 - RNA, 20 nt, Homo sapiens
  source 1..20: mol_type = genomic RNA
aaactcgcatctactggcaa

SEQ ID NO: 907 - RNA, 20 nt, Homo sapiens
  source 1..20: mol_type = genomic RNA
aactcgcatctactggcaaa

SEQ ID NO: 908 - RNA, 20 nt, Homo sapiens
  source 1..20: mol_type = genomic RNA
actcgcatctactggcaaaa

SEQ ID NO: 909 - RNA, 20 nt, Homo sapiens
  source 1..20: mol_type = genomic RNA
ctcgcatctactggcaaaag

SEQ ID NO: 910 - RNA, 20 nt, Homo sapiens
  source 1..20: mol_type = genomic RNA
tcgcatctactggcaaaagg

SEQ ID NO: 911 - RNA, 20 nt, Homo sapiens
  source 1..20: mol_type = genomic RNA
cgcatctactggcaaaagga

SEQ ID NO: 912 - RNA, 20 nt, Homo sapiens
  source 1..20: mol_type = genomic RNA
gcatctactggcaaaaggag

SEQ ID NO: 913 - RNA, 20 nt, Homo sapiens
  source 1..20: mol_type = genomic RNA
catctactggcaaaaggaga

SEQ ID NO: 914 - RNA, 20 nt, Homo sapiens
  source 1..20: mol_type = genomic RNA
atctactggcaaaaggagaa

SEQ ID NO: 915 - RNA, 20 nt, Homo sapiens
  source 1..20: mol_type = genomic RNA
tctactggcaaaaggagaag

SEQ ID NO: 916 - RNA, 20 nt, Homo sapiens
  source 1..20: mol_type = genomic RNA
ctactggcaaaaggagaaga

SEQ ID NO: 917 - RNA, 20 nt, Homo sapiens
  source 1..20: mol_type = genomic RNA
tactggcaaaaggagaagaa

SEQ ID NO: 918 - RNA, 20 nt, Homo sapiens
  source 1..20: mol_type = genomic RNA
actggcaaaaggagaagaaa

SEQ ID NO: 919 - RNA, 20 nt, Homo sapiens
  source 1..20: mol_type = genomic RNA
ctggcaaaaggagaagaaaa

SEQ ID NO: 920 - RNA, 20 nt, Homo sapiens
  source 1..20: mol_type = genomic RNA
tggcaaaaggagaagaaaat

SEQ ID NO: 921 - RNA, 20 nt, Homo sapiens
  source 1..20: mol_type = genomic RNA
ggcaaaaggagaagaaaatg

SEQ ID NO: 922 - RNA, 20 nt, Homo sapiens
  source 1..20: mol_type = genomic RNA
gcaaaaggagaagaaaatgg

SEQ ID NO: 923 - RNA, 20 nt, Homo sapiens
  source 1..20: mol_type = genomic RNA
caaaaggagaagaaaatggt

SEQ ID NO: 924 - RNA, 20 nt, Homo sapiens
  source 1..20: mol_type = genomic RNA
aaaaggagaagaaaatggtg

SEQ ID NO: 925 - RNA, 20 nt, Homo sapiens
  source 1..20: mol_type = genomic RNA
aaaggagaagaaaatggtgc

SEQ ID NO: 926 - RNA, 20 nt, Homo sapiens
  source 1..20: mol_type = genomic RNA
aaggagaagaaaatggtgct

SEQ ID NO: 927 - RNA, 20 nt, Homo sapiens
  source 1..20: mol_type = genomic RNA
aggagaagaaaatggtgctg

SEQ ID NO: 928 - RNA, 20 nt, Homo sapiens
  source 1..20: mol_type = genomic RNA
ggagaagaaaatggtgctga

SEQ ID NO: 929 - RNA, 20 nt, Homo sapiens
  source 1..20: mol_type = genomic RNA
gagaagaaaatggtgctgac

SEQ ID NO: 930 - RNA, 20 nt, Homo sapiens
  source 1..20: mol_type = genomic RNA
agaagaaaatggtgctgact

SEQ ID NO: 931 - RNA, 20 nt, Homo sapiens
  source 1..20: mol_type = genomic RNA
gaagaaaatggtgctgacta

SEQ ID NO: 932 - RNA, 20 nt, Homo sapiens
  source 1..20: mol_type = genomic RNA
aagaaaatggtgctgactat

SEQ ID NO: 933 - RNA, 20 nt, Homo sapiens
  source 1..20: mol_type = genomic RNA
agaaaatggtgctgactatg

SEQ ID NO: 934 - RNA, 20 nt, Homo sapiens
  source 1..20: mol_type = genomic RNA
gaaaatggtgctgactatga

SEQ ID NO: 935 - RNA, 20 nt, Homo sapiens
  source 1..20: mol_type = genomic RNA
aaaatggtgctgactatgat

SEQ ID NO: 936 - RNA, 20 nt, Homo sapiens
  source 1..20: mol_type = genomic RNA
aaatggtgctgactatgatg

SEQ ID NO: 937 - RNA, 20 nt, Homo sapiens
  source 1..20: mol_type = genomic RNA
aatggtgctgactatgatgt

SEQ ID NO: 938 - RNA, 20 nt, Homo sapiens
  source 1..20: mol_type = genomic RNA
atggtgctgactatgatgtc

SEQ ID NO: 939 - RNA, 20 nt, Homo sapiens
  source 1..20: mol_type = genomic RNA
tggtgctgactatgatgtct

SEQ ID NO: 940 - RNA, 20 nt, Homo sapiens
  source 1..20: mol_type = genomic RNA
ggtgctgactatgatgtctg

SEQ ID NO: 941 - RNA, 20 nt, Homo sapiens
  source 1..20: mol_type = genomic RNA
gtgctgactatgatgtctgg

SEQ ID NO: 942 - RNA, 20 nt, Homo sapiens
  source 1..20: mol_type = genomic RNA
tgctgactatgatgtctggg

SEQ ID NO: 943 - RNA, 20 nt, Homo sapiens
  source 1..20: mol_type = genomic RNA
gctgactatgatgtctgggg

SEQ ID NO: 944 - RNA, 20 nt, Homo sapiens
  source 1..20: mol_type = genomic RNA
ctgactatgatgtctgggga

SEQ ID NO: 945 - RNA, 20 nt, Homo sapiens
  source 1..20: mol_type = genomic RNA
tgactatgatgtctggggac

SEQ ID NO: 946 - RNA, 20 nt, Homo sapiens
  source 1..20: mol_type = genomic RNA
gactatgatgtctggggaca

SEQ ID NO: 947 - RNA, 20 nt, Homo sapiens
  source 1..20: mol_type = genomic RNA
actatgatgtctggggacat

SEQ ID NO: 948 - RNA, 20 nt, Homo sapiens
  source 1..20: mol_type = genomic RNA
ctatgatgtctggggacatg

SEQ ID NO: 949 - RNA, 20 nt, Homo sapiens
  source 1..20: mol_type = genomic RNA
tatgatgtctggggacatga

SEQ ID NO: 950 - RNA, 20 nt, Homo sapiens
  source 1..20: mol_type = genomic RNA
atgatgtctggggacatgaa

SEQ ID NO: 951 - RNA, 20 nt, Homo sapiens
  source 1..20: mol_type = genomic RNA
tgatgtctggggacatgaat

SEQ ID NO: 952 - RNA, 20 nt, Homo sapiens
  source 1..20: mol_type = genomic RNA
gatgtctggggacatgaata

SEQ ID NO: 953 - RNA, 20 nt, Homo sapiens
  source 1..20: mol_type = genomic RNA
atgtctggggacatgaatat

SEQ ID NO: 954 - RNA, 20 nt, Homo sapiens
  source 1..20: mol_type = genomic RNA
tgtctggggacatgaatata

SEQ ID NO: 955 - RNA, 20 nt, Homo sapiens
  source 1..20: mol_type = genomic RNA
gtctggggacatgaatatat

SEQ ID NO: 956 - RNA, 20 nt, Homo sapiens
  source 1..20: mol_type = genomic RNA
tctggggacatgaatatatg

SEQ ID NO: 957 - RNA, 20 nt, Homo sapiens
  source 1..20: mol_type = genomic RNA
ctggggacatgaatatatgg

SEQ ID NO: 958 - RNA, 20 nt, Homo sapiens
  source 1..20: mol_type = genomic RNA
tggggacatgaatatatggc

SEQ ID NO: 959 - RNA, 20 nt, Homo sapiens
  source 1..20: mol_type = genomic RNA
ggggacatgaatatatggcc

SEQ ID NO: 960 - RNA, 20 nt, Homo sapiens
  source 1..20: mol_type = genomic RNA
gggacatgaatatatggccc

SEQ ID NO: 961 - RNA, 20 nt, Homo sapiens
  source 1..20: mol_type = genomic RNA
ggacatgaatatatggcccg

SEQ ID NO: 962 - RNA, 20 nt, Homo sapiens
  source 1..20: mol_type = genomic RNA
gacatgaatatatggcccga

SEQ ID NO: 963 - RNA, 20 nt, Homo sapiens
  source 1..20: mol_type = genomic RNA
acatgaatatatggcccgag

SEQ ID NO: 964 - RNA, 20 nt, Homo sapiens
  source 1..20: mol_type = genomic RNA
catgaatatatggcccgagt

SEQ ID NO: 965 - RNA, 20 nt, Homo sapiens
  source 1..20: mol_type = genomic RNA
atgaatatatggcccgagta

SEQ ID NO: 966 - RNA, 20 nt, Homo sapiens
  source 1..20: mol_type = genomic RNA
tgaatatatggcccgagtac

SEQ ID NO: 967 - RNA, 20 nt, Homo sapiens
  source 1..20: mol_type = genomic RNA
gaatatatggcccgagtaca

SEQ ID NO: 968 - RNA, 20 nt, Homo sapiens
  source 1..20: mol_type = genomic RNA
aatatatggcccgagtacaa

SEQ ID NO: 969 - RNA, 20 nt, Homo sapiens
  source 1..20: mol_type = genomic RNA
atatatggcccgagtacaag

SEQ ID NO: 970 - RNA, 20 nt, Homo sapiens
  source 1..20: mol_type = genomic RNA
tatatggcccgagtacaaga

SEQ ID NO: 971 - RNA, 20 nt, Homo sapiens
  source 1..20: mol_type = genomic RNA
atatggcccgagtacaagaa

SEQ ID NO: 972 - RNA, 20 nt, Homo sapiens
  source 1..20: mol_type = genomic RNA
tatggcccgagtacaagaac

SEQ ID NO: 973 - RNA, 20 nt, Homo sapiens
  source 1..20: mol_type = genomic RNA
atggcccgagtacaagaacc

SEQ ID NO: 974 - RNA, 20 nt, Homo sapiens
  source 1..20: mol_type = genomic RNA
tggcccgagtacaagaaccg

SEQ ID NO: 975 - RNA, 20 nt, Homo sapiens
  source 1..20: mol_type = genomic RNA
ggcccgagtacaagaaccgg

SEQ ID NO: 976 - RNA, 20 nt, Homo sapiens
  source 1..20: mol_type = genomic RNA
gcccgagtacaagaaccgga

SEQ ID NO: 977 - RNA, 20 nt, Homo sapiens
  source 1..20: mol_type = genomic RNA
cccgagtacaagaaccggac

SEQ ID NO: 978 - RNA, 20 nt, Homo sapiens
  source 1..20: mol_type = genomic RNA
ccgagtacaagaaccggacc

SEQ ID NO: 979 - RNA, 20 nt, Homo sapiens
  source 1..20: mol_type = genomic RNA
cgagtacaagaaccggacca

SEQ ID NO: 980 - RNA, 20 nt, Homo sapiens
  source 1..20: mol_type = genomic RNA
gagtacaagaaccggaccat

SEQ ID NO: 981 - RNA, 20 nt, Homo sapiens
  source 1..20: mol_type = genomic RNA
agtacaagaaccggaccatc

SEQ ID NO: 982 - RNA, 20 nt, Homo sapiens
  source 1..20: mol_type = genomic RNA
gtacaagaaccggaccatct

SEQ ID NO: 983 - RNA, 20 nt, Homo sapiens
  source 1..20: mol_type = genomic RNA
tacaagaaccggaccatctt

SEQ ID NO: 984 - RNA, 20 nt, Homo sapiens
  source 1..20: mol_type = genomic RNA
acaagaaccggaccatcttt

SEQ ID NO: 985 - RNA, 20 nt, Homo sapiens
  source 1..20: mol_type = genomic RNA
caagaaccggaccatctttg

SEQ ID NO: 986 - RNA, 20 nt, Homo sapiens
  source 1..20: mol_type = genomic RNA
aagaaccggaccatctttga

SEQ ID NO: 987 - RNA, 20 nt, Homo sapiens
  source 1..20: mol_type = genomic RNA
agaaccggaccatctttgat

SEQ ID NO: 988 - RNA, 20 nt, Homo sapiens
  source 1..20: mol_type = genomic RNA
gaaccggaccatctttgata

SEQ ID NO: 989 - RNA, 20 nt, Homo sapiens
  source 1..20: mol_type = genomic RNA
aaccggaccatctttgatat

SEQ ID NO: 990 - RNA, 20 nt, Homo sapiens
  source 1..20: mol_type = genomic RNA
accggaccatctttgatatc

SEQ ID NO: 991 - RNA, 20 nt, Homo sapiens
  source 1..20: mol_type = genomic RNA
ccggaccatctttgatatca

SEQ ID NO: 992 - RNA, 20 nt, Homo sapiens
  source 1..20: mol_type = genomic RNA
cggaccatctttgatatcac

SEQ ID NO: 993 - RNA, 20 nt, Homo sapiens
  source 1..20: mol_type = genomic RNA
ggaccatctttgatatcact

SEQ ID NO: 994 - RNA, 20 nt, Homo sapiens
  source 1..20: mol_type = genomic RNA
gaccatctttgatatcacta

SEQ ID NO: 995 - RNA, 20 nt, Homo sapiens
  source 1..20: mol_type = genomic RNA
accatctttgatatcactaa

SEQ ID NO: 996 - RNA, 20 nt, Homo sapiens
  source 1..20: mol_type = genomic RNA
ccatctttgatatcactaat

SEQ ID NO: 997 - RNA, 20 nt, Homo sapiens
  source 1..20: mol_type = genomic RNA
catctttgatatcactaata

SEQ ID NO: 998 - RNA, 20 nt, Homo sapiens
  source 1..20: mol_type = genomic RNA
atctttgatatcactaataa

SEQ ID NO: 999 - RNA, 20 nt, Homo sapiens
  source 1..20: mol_type = genomic RNA
tctttgatatcactaataac

SEQ ID NO: 1000 - RNA, 20 nt, Homo sapiens
  source 1..20: mol_type = genomic RNA
ctttgatatcactaataacc

SEQ ID NO: 1001 - RNA, 20 nt, Homo sapiens
  source 1..20: mol_type = genomic RNA
tttgatatcactaataacct

SEQ ID NO: 1002 - RNA, 20 nt, Homo sapiens
  source 1..20: mol_type = genomic RNA
ttgatatcactaataacctc

SEQ ID NO: 1003 - RNA, 20 nt, Homo sapiens
  source 1..20: mol_type = genomic RNA
tgatatcactaataacctct

SEQ ID NO: 1004 - RNA, 20 nt, Homo sapiens
  source 1..20: mol_type = genomic RNA
gatatcactaataacctctc

SEQ ID NO: 1005 - RNA, 20 nt, Homo sapiens
  source 1..20: mol_type = genomic RNA
atatcactaataacctctcc

SEQ ID NO: 1006 - RNA, 20 nt, Homo sapiens
  source 1..20: mol_type = genomic RNA
tatcactaataacctctcca

SEQ ID NO: 1007 - RNA, 20 nt, Homo sapiens
  source 1..20: mol_type = genomic RNA
atcactaataacctctccat

SEQ ID NO: 1008 - RNA, 20 nt, Homo sapiens
  source 1..20: mol_type = genomic RNA
tcactaataacctctccatt

SEQ ID NO: 1009 - RNA, 20 nt, Homo sapiens
  source 1..20: mol_type = genomic RNA
cactaataacctctccattg

SEQ ID NO: 1010 - RNA, 20 nt, Homo sapiens
  source 1..20: mol_type = genomic RNA
actaataacctctccattgt

SEQ ID NO: 1011 - RNA, 20 nt, Homo sapiens
  source 1..20: mol_type = genomic RNA
ctaataacctctccattgtg

SEQ ID NO: 1012 - RNA, 20 nt, Homo sapiens
  source 1..20: mol_type = genomic RNA
taataacctctccattgtga

SEQ ID NO: 1013 - RNA, 20 nt, Homo sapiens
  source 1..20: mol_type = genomic RNA
aataacctctccattgtgat

SEQ ID NO: 1014 - RNA, 20 nt, Homo sapiens
  source 1..20: mol_type = genomic RNA
ataacctctccattgtgatc

SEQ ID NO: 1015 - RNA, 20 nt, Homo sapiens
  source 1..20: mol_type = genomic RNA
taacctctccattgtgatcc

SEQ ID NO: 1016 - RNA, 20 nt, Homo sapiens
  source 1..20: mol_type = genomic RNA
aacctctccattgtgatcct

SEQ ID NO: 1017 - RNA, 20 nt, Homo sapiens
  source 1..20: mol_type = genomic RNA
acctctccattgtgatcctg

SEQ ID NO: 1018 - RNA, 20 nt, Homo sapiens
  source 1..20: mol_type = genomic RNA
cctctccattgtgatcctgg

SEQ ID NO: 1019 - RNA, 20 nt, Homo sapiens
  source 1..20: mol_type = genomic RNA
ctctccattgtgatcctggc

SEQ ID NO: 1020 - RNA, 20 nt, Homo sapiens
  source 1..20: mol_type = genomic RNA
tctccattgtgatcctggct

SEQ ID NO: 1021 - RNA, 20 nt, Homo sapiens
  source 1..20: mol_type = genomic RNA
ctccattgtgatcctggctc

SEQ ID NO: 1022 - RNA, 20 nt, Homo sapiens
  source 1..20: mol_type = genomic RNA
tccattgtgatcctggctct

SEQ ID NO: 1023 - RNA, 20 nt, Homo sapiens
  source 1..20: mol_type = genomic RNA
ccattgtgatcctggctctg

SEQ ID NO: 1024 - RNA, 20 nt, Homo sapiens
  source 1..20: mol_type = genomic RNA
cattgtgatcctggctctgc

SEQ ID NO: 1025 - RNA, 20 nt, Homo sapiens
  source 1..20: mol_type = genomic RNA
attgtgatcctggctctgcg

SEQ ID NO: 1026 - RNA, 20 nt, Homo sapiens
  source 1..20: mol_type = genomic RNA
ttgtgatcctggctctgcgc

SEQ ID NO: 1027 - RNA, 20 nt, Homo sapiens
  source 1..20: mol_type = genomic RNA
tgtgatcctggctctgcgcc

SEQ ID NO: 1028 - RNA, 20 nt, Homo sapiens
  source 1..20: mol_type = genomic RNA
gtgatcctggctctgcgccc

SEQ ID NO: 1029 - RNA, 20 nt, Homo sapiens
  source 1..20: mol_type = genomic RNA
tgatcctggctctgcgccca

SEQ ID NO: 1030 - RNA, 20 nt, Homo sapiens
  source 1..20: mol_type = genomic RNA
gatcctggctctgcgcccat

SEQ ID NO: 1031 - RNA, 20 nt, Homo sapiens
  source 1..20: mol_type = genomic RNA
atcctggctctgcgcccatc

SEQ ID NO: 1032 - RNA, 20 nt, Homo sapiens
  source 1..20: mol_type = genomic RNA
tcctggctctgcgcccatct

SEQ ID NO: 1033 - RNA, 20 nt, Homo sapiens
  source 1..20: mol_type = genomic RNA
cctggctctgcgcccatctg

SEQ ID NO: 1034 - RNA, 20 nt, Homo sapiens
  source 1..20: mol_type = genomic RNA
ctggctctgcgcccatctga

SEQ ID NO: 1035 - RNA, 20 nt, Homo sapiens
  source 1..20: mol_type = genomic RNA
tggctctgcgcccatctgac

SEQ ID NO: 1036 - RNA, 20 nt, Homo sapiens
  source 1..20: mol_type = genomic RNA
ggctctgcgcccatctgacg

SEQ ID NO: 1037 - RNA, 20 nt, Homo sapiens
  source 1..20: mol_type = genomic RNA
gctctgcgcccatctgacga

SEQ ID NO: 1038 - RNA, 20 nt, Homo sapiens
  source 1..20: mol_type = genomic RNA
ctctgcgcccatctgacgag

SEQ ID NO: 1039 - RNA, 20 nt, Homo sapiens
  source 1..20: mol_type = genomic RNA
tctgcgcccatctgacgagg

SEQ ID NO: 1040 - RNA, 20 nt, Homo sapiens
  source 1..20: mol_type = genomic RNA
ctgcgcccatctgacgaggg

SEQ ID NO: 1041 - RNA, 20 nt, Homo sapiens
  source 1..20: mol_type = genomic RNA
tgcgcccatctgacgagggc

SEQ ID NO: 1042 - RNA, 20 nt, Homo sapiens
  source 1..20: mol_type = genomic RNA
gcgcccatctgacgagggca

SEQ ID NO: 1043 - RNA, 20 nt, Homo sapiens
  source 1..20: mol_type = genomic RNA
cgcccatctgacgagggcac

SEQ ID NO: 1044 - RNA, 20 nt, Homo sapiens
  source 1..20: mol_type = genomic RNA
gcccatctgacgagggcaca

SEQ ID NO: 1045 - RNA, 20 nt, Homo sapiens
  source 1..20: mol_type = genomic RNA
cccatctgacgagggcacat

SEQ ID NO: 1046 - RNA, 20 nt, Homo sapiens
  source 1..20: mol_type = genomic RNA
ccatctgacgagggcacata

SEQ ID NO: 1047 - RNA, 20 nt, Homo sapiens
  source 1..20: mol_type = genomic RNA
catctgacgagggcacatac

SEQ ID NO: 1048 - RNA, 20 nt, Homo sapiens
  source 1..20: mol_type = genomic RNA
atctgacgagggcacatacg

SEQ ID NO: 1049 - RNA, 20 nt, Homo sapiens
  source 1..20: mol_type = genomic RNA
tctgacgagggcacatacga

SEQ ID NO: 1050 - RNA, 20 nt, Homo sapiens
  source 1..20: mol_type = genomic RNA
ctgacgagggcacatacgag

SEQ ID NO: 1051 - RNA, 20 nt, Homo sapiens
  source 1..20: mol_type = genomic RNA
tgacgagggcacatacgagt

SEQ ID NO: 1052 - RNA, 20 nt, Homo sapiens
  source 1..20: mol_type = genomic RNA
gacgagggcacatacgagtg

SEQ ID NO: 1053 - RNA, 20 nt, Homo sapiens
  source 1..20: mol_type = genomic RNA
acgagggcacatacgagtgt

SEQ ID NO: 1054 - RNA, 20 nt, Homo sapiens
  source 1..20: mol_type = genomic RNA
cgagggcacatacgagtgtg

SEQ ID NO: 1055 - RNA, 20 nt, Homo sapiens
  source 1..20: mol_type = genomic RNA
gagggcacatacgagtgtgt

SEQ ID NO: 1056 - RNA, 20 nt, Homo sapiens
  source 1..20: mol_type = genomic RNA
agggcacatacgagtgtgtt

SEQ ID NO: 1057 - RNA, 20 nt, Homo sapiens
  source 1..20: mol_type = genomic RNA
gggcacatacgagtgtgttg

SEQ ID NO: 1058 - RNA, 20 nt, Homo sapiens
  source 1..20: mol_type = genomic RNA
ggcacatacgagtgtgttgt

SEQ ID NO: 1059 - RNA, 20 nt, Homo sapiens
  source 1..20: mol_type = genomic RNA
gcacatacgagtgtgttgtt

SEQ ID NO: 1060 - RNA, 20 nt, Homo sapiens
  source 1..20: mol_type = genomic RNA
cacatacgagtgtgttgttc

SEQ ID NO: 1061 - RNA, 20 nt, Homo sapiens
  source 1..20: mol_type = genomic RNA
acatacgagtgtgttgttct

SEQ ID NO: 1062 - RNA, 20 nt, Homo sapiens
  source 1..20: mol_type = genomic RNA
catacgagtgtgttgttctg

SEQ ID NO: 1063 - RNA, 20 nt, Homo sapiens
  source 1..20: mol_type = genomic RNA
atacgagtgtgttgttctga

SEQ ID NO: 1064 - RNA, 20 nt, Homo sapiens
  source 1..20: mol_type = genomic RNA
tacgagtgtgttgttctgaa

SEQ ID NO: 1065 - RNA, 20 nt, Homo sapiens
  source 1..20: mol_type = genomic RNA
acgagtgtgttgttctgaag

SEQ ID NO: 1066 - RNA, 20 nt, Homo sapiens
  source 1..20: mol_type = genomic RNA
cgagtgtgttgttctgaagt

SEQ ID NO: 1067 - RNA, 20 nt, Homo sapiens
  source 1..20: mol_type = genomic RNA
gagtgtgttgttctgaagta

SEQ ID NO: 1068 - RNA, 20 nt, Homo sapiens
  source 1..20: mol_type = genomic RNA
agtgtgttgttctgaagtat

SEQ ID NO: 1069 - RNA, 20 nt, Homo sapiens
  source 1..20: mol_type = genomic RNA
gtgtgttgttctgaagtatg

SEQ ID NO: 1070 - RNA, 20 nt, Homo sapiens
  source 1..20: mol_type = genomic RNA
tgtgttgttctgaagtatga

SEQ ID NO: 1071 - RNA, 20 nt, Homo sapiens
  source 1..20: mol_type = genomic RNA
gtgttgttctgaagtatgaa

SEQ ID NO: 1072 - RNA, 20 nt, Homo sapiens
  source 1..20: mol_type = genomic RNA
tgttgttctgaagtatgaaa

SEQ ID NO: 1073 - RNA, 20 nt, Homo sapiens
  source 1..20: mol_type = genomic RNA
gttgttctgaagtatgaaaa

SEQ ID NO: 1074 - RNA, 20 nt, Homo sapiens
  source 1..20: mol_type = genomic RNA
ttgttctgaagtatgaaaaa

SEQ ID NO: 1075 - RNA, 20 nt, Homo sapiens
  source 1..20: mol_type = genomic RNA
tgttctgaagtatgaaaaag

SEQ ID NO: 1076 - RNA, 20 nt, Homo sapiens
  source 1..20: mol_type = genomic RNA
gttctgaagtatgaaaaaga

SEQ ID NO: 1077 - RNA, 20 nt, Homo sapiens
  source 1..20: mol_type = genomic RNA
ttctgaagtatgaaaaagac

SEQ ID NO: 1078 - RNA, 20 nt, Homo sapiens
  source 1..20: mol_type = genomic RNA
tctgaagtatgaaaaagacg

SEQ ID NO: 1079 - RNA, 20 nt, Homo sapiens
  source 1..20: mol_type = genomic RNA
ctgaagtatgaaaaagacgc

SEQ ID NO: 1080 - RNA, 20 nt, Homo sapiens
  source 1..20: mol_type = genomic RNA
tgaagtatgaaaaagacgct

SEQ ID NO: 1081 - RNA, 20 nt, Homo sapiens
  source 1..20: mol_type = genomic RNA
gaagtatgaaaaagacgctt

SEQ ID NO: 1082 - RNA, 20 nt, Homo sapiens
  source 1..20: mol_type = genomic RNA
aagtatgaaaaagacgcttt

SEQ ID NO: 1083 - RNA, 20 nt, Homo sapiens
  source 1..20: mol_type = genomic RNA
agtatgaaaaagacgctttc

SEQ ID NO: 1084 - RNA, 20 nt, Homo sapiens
  source 1..20: mol_type = genomic RNA
gtatgaaaaagacgctttca

SEQ ID NO: 1085 - RNA, 20 nt, Homo sapiens
  source 1..20: mol_type = genomic RNA
tatgaaaaagacgctttcaa

SEQ ID NO: 1086 - RNA, 20 nt, Homo sapiens
  source 1..20: mol_type = genomic RNA
atgaaaaagacgctttcaag

SEQ ID NO: 1087 - RNA, 20 nt, Homo sapiens
  source 1..20: mol_type = genomic RNA
tgaaaaagacgctttcaagc

SEQ ID NO: 1088 - RNA, 20 nt, Homo sapiens
  source 1..20: mol_type = genomic RNA
gaaaaagacgctttcaagcg

SEQ ID NO: 1089 - RNA, 20 nt, Homo sapiens
  source 1..20: mol_type = genomic RNA
aaaaagacgctttcaagcgg

SEQ ID NO: 1090 - RNA, 20 nt, Homo sapiens
  source 1..20: mol_type = genomic RNA
aaaagacgctttcaagcggg

SEQ ID NO: 1091 - RNA, 20 nt, Homo sapiens
  source 1..20: mol_type = genomic RNA
aaagacgctttcaagcggga

SEQ ID NO: 1092 - RNA, 20 nt, Homo sapiens
  source 1..20: mol_type = genomic RNA
aagacgctttcaagcgggaa

SEQ ID NO: 1093 - RNA, 20 nt, Homo sapiens
  source 1..20: mol_type = genomic RNA
agacgctttcaagcgggaac

SEQ ID NO: 1094 - RNA, 20 nt, Homo sapiens
  source 1..20: mol_type = genomic RNA
gacgctttcaagcgggaaca

SEQ ID NO: 1095 - RNA, 20 nt, Homo sapiens
  source 1..20: mol_type = genomic RNA
acgctttcaagcgggaacac

SEQ ID NO: 1096 - RNA, 20 nt, Homo sapiens
  source 1..20: mol_type = genomic RNA
cgctttcaagcgggaacacc

SEQ ID NO: 1097 - RNA, 20 nt, Homo sapiens
  source 1..20: mol_type = genomic RNA
gctttcaagcgggaacacct

SEQ ID NO: 1098 - RNA, 20 nt, Homo sapiens
  source 1..20: mol_type = genomic RNA
ctttcaagcgggaacacctg

SEQ ID NO: 1099 - RNA, 20 nt, Homo sapiens
  source 1..20: mol_type = genomic RNA
tttcaagcgggaacacctgg

SEQ ID NO: 1100 - RNA, 20 nt, Homo sapiens
  source 1..20: mol_type = genomic RNA
ttcaagcgggaacacctggc

SEQ ID NO: 1101 - RNA, 20 nt, Homo sapiens
  source 1..20: mol_type = genomic RNA
tcaagcgggaacacctggct

SEQ ID NO: 1102 - RNA, 20 nt, Homo sapiens
  source 1..20: mol_type = genomic RNA
caagcgggaacacctggctg

SEQ ID NO: 1103 - RNA, 20 nt, Homo sapiens
  source 1..20: mol_type = genomic RNA
aagcgggaacacctggctga

SEQ ID NO: 1104 - RNA, 20 nt, Homo sapiens
  source 1..20: mol_type = genomic RNA
agcgggaacacctggctgaa

SEQ ID NO: 1105 - RNA, 20 nt, Homo sapiens
  source 1..20: mol_type = genomic RNA
gcgggaacacctggctgaag

SEQ ID NO: 1106 - RNA, 20 nt, Homo sapiens
  source 1..20: mol_type = genomic RNA
cgggaacacctggctgaagt

SEQ ID NO: 1107 - RNA, 20 nt, Homo sapiens
  source 1..20: mol_type = genomic RNA
gggaacacctggctgaagtg

SEQ ID NO: 1108 - RNA, 20 nt, Homo sapiens
  source 1..20: mol_type = genomic RNA
ggaacacctggctgaagtga

SEQ ID NO: 1109 - RNA, 20 nt, Homo sapiens
  source 1..20: mol_type = genomic RNA
gaacacctggctgaagtgac

SEQ ID NO: 1110 - RNA, 20 nt, Homo sapiens
  source 1..20: mol_type = genomic RNA
aacacctggctgaagtgacg

SEQ ID NO: 1111 - RNA, 20 nt, Homo sapiens
  source 1..20: mol_type = genomic RNA
acacctggctgaagtgacgt

SEQ ID NO: 1112 - RNA, 20 nt, Homo sapiens
  source 1..20: mol_type = genomic RNA
cacctggctgaagtgacgtt

SEQ ID NO: 1113 - RNA, 20 nt, Homo sapiens
  source 1..20: mol_type = genomic RNA
acctggctgaagtgacgtta

SEQ ID NO: 1114 - RNA, 20 nt, Homo sapiens
  source 1..20: mol_type = genomic RNA
cctggctgaagtgacgttat

SEQ ID NO: 1115 - RNA, 20 nt, Homo sapiens
  source 1..20: mol_type = genomic RNA
ctggctgaagtgacgttatc

SEQ ID NO: 1116 - RNA, 20 nt, Homo sapiens
  source 1..20: mol_type = genomic RNA
tggctgaagtgacgttatca

SEQ ID NO: 1117 - RNA, 20 nt, Homo sapiens
  source 1..20: mol_type = genomic RNA
ggctgaagtgacgttatcag

SEQ ID NO: 1118 - RNA, 20 nt, Homo sapiens
  source 1..20: mol_type = genomic RNA
gctgaagtgacgttatcagt

SEQ ID NO: 1119 - RNA, 20 nt, Homo sapiens
  source 1..20: mol_type = genomic RNA
ctgaagtgacgttatcagtc

SEQ ID NO: 1120 - RNA, 20 nt, Homo sapiens
  source 1..20: mol_type = genomic RNA
tgaagtgacgttatcagtca

SEQ ID NO: 1121 - RNA, 20 nt, Homo sapiens
  source 1..20: mol_type = genomic RNA
gaagtgacgttatcagtcaa

SEQ ID NO: 1122 - RNA, 20 nt, Homo sapiens
  source 1..20: mol_type = genomic RNA
aagtgacgttatcagtcaaa

SEQ ID NO: 1123 - RNA, 20 nt, Homo sapiens
  source 1..20: mol_type = genomic RNA
agtgacgttatcagtcaaag

SEQ ID NO: 1124 - RNA, 20 nt, Homo sapiens
  source 1..20: mol_type = genomic RNA
gtgacgttatcagtcaaagc

SEQ ID NO: 1125 - RNA, 20 nt, Homo sapiens
  source 1..20: mol_type = genomic RNA
tgacgttatcagtcaaagct

SEQ ID NO: 1126 - RNA, 20 nt, Homo sapiens
  source 1..20: mol_type = genomic RNA
gacgttatcagtcaaagctg

SEQ ID NO: 1127 - RNA, 20 nt, Homo sapiens
  source 1..20: mol_type = genomic RNA
acgttatcagtcaaagctga

SEQ ID NO: 1128 - RNA, 20 nt, Homo sapiens
  source 1..20: mol_type = genomic RNA
cgttatcagtcaaagctgac

SEQ ID NO: 1129 - RNA, 20 nt, Homo sapiens
  source 1..20: mol_type = genomic RNA
gttatcagtcaaagctgact

SEQ ID NO: 1130 - RNA, 20 nt, Homo sapiens
  source 1..20: mol_type = genomic RNA
ttatcagtcaaagctgactt

SEQ ID NO: 1131 - RNA, 20 nt, Homo sapiens
  source 1..20: mol_type = genomic RNA
tatcagtcaaagctgacttc

SEQ ID NO: 1132 - RNA, 20 nt, Homo sapiens
  source 1..20: mol_type = genomic RNA
atcagtcaaagctgacttcc

SEQ ID NO: 1133 - RNA, 20 nt, Homo sapiens
  source 1..20: mol_type = genomic RNA
tcagtcaaagctgacttccc

SEQ ID NO: 1134 - RNA, 20 nt, Homo sapiens
  source 1..20: mol_type = genomic RNA
cagtcaaagctgacttccct

SEQ ID NO: 1135 - RNA, 20 nt, Homo sapiens
  source 1..20: mol_type = genomic RNA
agtcaaagctgacttcccta

SEQ ID NO: 1136 - RNA, 20 nt, Homo sapiens
  source 1..20: mol_type = genomic RNA
gtcaaagctgacttccctac

SEQ ID NO: 1137 - RNA, 20 nt, Homo sapiens
  source 1..20: mol_type = genomic RNA
tcaaagctgacttccctaca

SEQ ID NO: 1138 - RNA, 20 nt, Homo sapiens
  source 1..20: mol_type = genomic RNA
caaagctgacttccctacac

SEQ ID NO: 1139 - RNA, 20 nt, Homo sapiens
  source 1..20: mol_type = genomic RNA
aaagctgacttccctacacc

SEQ ID NO: 1140 - RNA, 20 nt, Homo sapiens
  source 1..20: mol_type = genomic RNA
aagctgacttccctacacct

SEQ ID NO: 1141 - RNA, 20 nt, Homo sapiens
  source 1..20: mol_type = genomic RNA
agctgacttccctacaccta

SEQ ID NO: 1142 - RNA, 20 nt, Homo sapiens
  source 1..20: mol_type = genomic RNA
gctgacttccctacacctag

SEQ ID NO: 1143 - RNA, 20 nt, Homo sapiens
  source 1..20: mol_type = genomic RNA
ctgacttccctacacctagt

SEQ ID NO: 1144 - RNA, 20 nt, Homo sapiens
  source 1..20: mol_type = genomic RNA
tgacttccctacacctagta

SEQ ID NO: 1145 - RNA, 20 nt, Homo sapiens
  source 1..20: mol_type = genomic RNA
gacttccctacacctagtat

SEQ ID NO: 1146 - RNA, 20 nt, Homo sapiens
  source 1..20: mol_type = genomic RNA
acttccctacacctagtata

SEQ ID NO: 1147 - RNA, 20 nt, Homo sapiens
  source 1..20: mol_type = genomic RNA
cttccctacacctagtatat

SEQ ID NO: 1148 - RNA, 20 nt, Homo sapiens
  source 1..20: mol_type = genomic RNA
ttccctacacctagtatatc

SEQ ID NO: 1149 - RNA, 20 nt, Homo sapiens
  source 1..20: mol_type = genomic RNA
tccctacacctagtatatct

SEQ ID NO: 1150 - RNA, 20 nt, Homo sapiens
  source 1..20: mol_type = genomic RNA
ccctacacctagtatatctg

SEQ ID NO: 1151 - RNA, 20 nt, Homo sapiens
  source 1..20: mol_type = genomic RNA
cctacacctagtatatctga

SEQ ID NO: 1152 - RNA, 20 nt, Homo sapiens
  source 1..20: mol_type = genomic RNA
ctacacctagtatatctgac

SEQ ID NO: 1153 - RNA, 20 nt, Homo sapiens
  source 1..20: mol_type = genomic RNA
tacacctagtatatctgact

SEQ ID NO: 1154 - RNA, 20 nt, Homo sapiens
  source 1..20: mol_type = genomic RNA
acacctagtatatctgactt

SEQ ID NO: 1155 - RNA, 20 nt, Homo sapiens
  source 1..20: mol_type = genomic RNA
cacctagtatatctgacttt

SEQ ID NO: 1156 - RNA, 20 nt, Homo sapiens
  source 1..20: mol_type = genomic RNA
acctagtatatctgactttg

SEQ ID NO: 1157 - RNA, 20 nt, Homo sapiens
  source 1..20: mol_type = genomic RNA
cctagtatatctgactttga

SEQ ID NO: 1158 - RNA, 20 nt, Homo sapiens
  source 1..20: mol_type = genomic RNA
ctagtatatctgactttgaa

SEQ ID NO: 1159 - RNA, 20 nt, Homo sapiens
  source 1..20: mol_type = genomic RNA
tagtatatctgactttgaaa

SEQ ID NO: 1160 - RNA, 20 nt, Homo sapiens
  source 1..20: mol_type = genomic RNA
agtatatctgactttgaaat

SEQ ID NO: 1161 - RNA, 20 nt, Homo sapiens
  source 1..20: mol_type = genomic RNA
gtatatctgactttgaaatt

SEQ ID NO: 1162 - RNA, 20 nt, Homo sapiens
  source 1..20: mol_type = genomic RNA
tatatctgactttgaaattc

SEQ ID NO: 1163 - RNA, 20 nt, Homo sapiens
  source 1..20: mol_type = genomic RNA
atatctgactttgaaattcc

SEQ ID NO: 1164 - RNA, 20 nt, Homo sapiens
  source 1..20: mol_type = genomic RNA
tatctgactttgaaattcca

SEQ ID NO: 1165 - RNA, 20 nt, Homo sapiens
  source 1..20: mol_type = genomic RNA
atctgactttgaaattccaa

SEQ ID NO: 1166 - RNA, 20 nt, Homo sapiens
  source 1..20: mol_type = genomic RNA
tctgactttgaaattccaac

SEQ ID NO: 1167 - RNA, 20 nt, Homo sapiens
  source 1..20: mol_type = genomic RNA
ctgactttgaaattccaact

SEQ ID NO: 1168 - RNA, 20 nt, Homo sapiens
  source 1..20: mol_type = genomic RNA
tgactttgaaattccaactt

SEQ ID NO: 1169 - RNA, 20 nt, Homo sapiens
  source 1..20: mol_type = genomic RNA
gactttgaaattccaacttc

SEQ ID NO: 1170 - RNA, 20 nt, Homo sapiens
  source 1..20: mol_type = genomic RNA
actttgaaattccaacttct

SEQ ID NO: 1171 - RNA, 20 nt, Homo sapiens
  source 1..20: mol_type = genomic RNA
ctttgaaattccaacttcta

SEQ ID NO: 1172 - RNA, 20 nt, Homo sapiens
  source 1..20: mol_type = genomic RNA
tttgaaattccaacttctaa

SEQ ID NO: 1173 - RNA, 20 nt, Homo sapiens
  source 1..20: mol_type = genomic RNA
ttgaaattccaacttctaat

SEQ ID NO: 1174 - RNA, 20 nt, Homo sapiens
  source 1..20: mol_type = genomic RNA
tgaaattccaacttctaata

SEQ ID NO: 1175 - RNA, 20 nt, Homo sapiens
  source 1..20: mol_type = genomic RNA
gaaattccaacttctaatat

SEQ ID NO: 1176 - RNA, 20 nt, Homo sapiens
  source 1..20: mol_type = genomic RNA
aaattccaacttctaatatt

SEQ ID NO: 1177 - RNA, 20 nt, Homo sapiens
  source 1..20: mol_type = genomic RNA
aattccaacttctaatatta

SEQ ID NO: 1178 - RNA, 20 nt, Homo sapiens
  source 1..20: mol_type = genomic RNA
attccaacttctaatattag

SEQ ID NO: 1179 - RNA, 20 nt, Homo sapiens
  source 1..20: mol_type = genomic RNA
ttccaacttctaatattaga

SEQ ID NO: 1180 - RNA, 20 nt, Homo sapiens
  source 1..20: mol_type = genomic RNA
tccaacttctaatattagaa

SEQ ID NO: 1181 - RNA, 20 nt, Homo sapiens
  source 1..20: mol_type = genomic RNA
ccaacttctaatattagaag

SEQ ID NO: 1182 - RNA, 20 nt, Homo sapiens
  source 1..20: mol_type = genomic RNA
caacttctaatattagaagg

SEQ ID NO: 1183 - RNA, 20 nt, Homo sapiens
  source 1..20: mol_type = genomic RNA
aacttctaatattagaagga

SEQ ID NO: 1184 - RNA, 20 nt, Homo sapiens
  source 1..20: mol_type = genomic RNA
acttctaatattagaaggat

SEQ ID NO: 1185 - RNA, 20 nt, Homo sapiens
  source 1..20: mol_type = genomic RNA
cttctaatattagaaggata

SEQ ID NO: 1186 - RNA, 20 nt, Homo sapiens
  source 1..20: mol_type = genomic RNA
ttctaatattagaaggataa

SEQ ID NO: 1187 - RNA, 20 nt, Homo sapiens
  source 1..20: mol_type = genomic RNA
tctaatattagaaggataat

SEQ ID NO: 1188 - RNA, 20 nt, Homo sapiens
  source 1..20: mol_type = genomic RNA
ctaatattagaaggataatt

SEQ ID NO: 1189 - RNA, 20 nt, Homo sapiens
  source 1..20: mol_type = genomic RNA
taatattagaaggataattt

SEQ ID NO: 1190 - RNA, 20 nt, Homo sapiens
  source 1..20: mol_type = genomic RNA
aatattagaaggataatttg

SEQ ID NO: 1191 - RNA, 20 nt, Homo sapiens
  source 1..20: mol_type = genomic RNA
atattagaaggataatttgc

SEQ ID NO: 1192 - RNA, 20 nt, Homo sapiens
  source 1..20: mol_type = genomic RNA
tattagaaggataatttgct

SEQ ID NO: 1193 - RNA, 20 nt, Homo sapiens
  source 1..20: mol_type = genomic RNA
attagaaggataatttgctc

SEQ ID NO: 1194 - RNA, 20 nt, Homo sapiens
  source 1..20: mol_type = genomic RNA
ttagaaggataatttgctca

SEQ ID NO: 1195 - RNA, 20 nt, Homo sapiens
  source 1..20: mol_type = genomic RNA
tagaaggataatttgctcaa

SEQ ID NO: 1196 - RNA, 20 nt, Homo sapiens
  source 1..20: mol_type = genomic RNA
agaaggataatttgctcaac

SEQ ID NO: 1197 - RNA, 20 nt, Homo sapiens
  source 1..20: mol_type = genomic RNA
gaaggataatttgctcaacc

SEQ ID NO: 1198 - RNA, 20 nt, Homo sapiens
  source 1..20: mol_type = genomic RNA
aaggataatttgctcaacct

SEQ ID NO: 1199 - RNA, 20 nt, Homo sapiens
  source 1..20: mol_type = genomic RNA
aggataatttgctcaacctc

SEQ ID NO: 1200 - RNA, 20 nt, Homo sapiens
  source 1..20: mol_type = genomic RNA
ggataatttgctcaacctct

SEQ ID NO: 1201 - RNA, 20 nt, Homo sapiens
  source 1..20: mol_type = genomic RNA
gataatttgctcaacctctg

SEQ ID NO: 1202 - RNA, 20 nt, Homo sapiens
  source 1..20: mol_type = genomic RNA
ataatttgctcaacctctgg

SEQ ID NO: 1203 - RNA, 20 nt, Homo sapiens
  source 1..20: mol_type = genomic RNA
taatttgctcaacctctgga

SEQ ID NO: 1204 - RNA, 20 nt, Homo sapiens
  source 1..20: mol_type = genomic RNA
aatttgctcaacctctggag

SEQ ID NO: 1205 - RNA, 20 nt, Homo sapiens
  source 1..20: mol_type = genomic RNA
atttgctcaacctctggagg

SEQ ID NO: 1206 - RNA, 20 nt, Homo sapiens
  source 1..20: mol_type = genomic RNA
tttgctcaacctctggaggt

SEQ ID NO: 1207 - RNA, 20 nt, Homo sapiens
  source 1..20: mol_type = genomic RNA
ttgctcaacctctggaggtt

SEQ ID NO: 1208 - RNA, 20 nt, Homo sapiens
  source 1..20: mol_type = genomic RNA
tgctcaacctctggaggttt

SEQ ID NO: 1209 - RNA, 20 nt, Homo sapiens
  source 1..20: mol_type = genomic RNA
gctcaacctctggaggtttt

SEQ ID NO: 1210 - RNA, 20 nt, Homo sapiens
  source 1..20: mol_type = genomic RNA
ctcaacctctggaggttttc

SEQ ID NO: 1211 - RNA, 20 nt, Homo sapiens
  source 1..20: mol_type = genomic RNA
tcaacctctggaggttttcc

SEQ ID NO: 1212 - RNA, 20 nt, Homo sapiens
  source 1..20: mol_type = genomic RNA
caacctctggaggttttcca

SEQ ID NO: 1213 - RNA, 20 nt, Homo sapiens
  source 1..20: mol_type = genomic RNA
aacctctggaggttttccag

SEQ ID NO: 1214 - RNA, 20 nt, Homo sapiens
  source 1..20: mol_type = genomic RNA
acctctggaggttttccaga

SEQ ID NO: 1215 - RNA, 20 nt, Homo sapiens
  source 1..20: mol_type = genomic RNA
cctctggaggttttccagag

SEQ ID NO: 1216 - RNA, 20 nt, Homo sapiens
  source 1..20: mol_type = genomic RNA
ctctggaggttttccagagc

SEQ ID NO: 1217 - RNA, 20 nt, Homo sapiens
  source 1..20: mol_type = genomic RNA
tctggaggttttccagagcc

SEQ ID NO: 1218 - RNA, 20 nt, Homo sapiens
  source 1..20: mol_type = genomic RNA
ctggaggttttccagagcct

SEQ ID NO: 1219 - RNA, 20 nt, Homo sapiens
  source 1..20: mol_type = genomic RNA
tggaggttttccagagcctc

SEQ ID NO: 1220 - RNA, 20 nt, Homo sapiens
  source 1..20: mol_type = genomic RNA
ggaggttttccagagcctca

SEQ ID NO: 1221 - RNA, 20 nt, Homo sapiens
  source 1..20: mol_type = genomic RNA
gaggttttccagagcctcac

SEQ ID NO: 1222 - RNA, 20 nt, Homo sapiens
  source 1..20: mol_type = genomic RNA
aggttttccagagcctcacc

SEQ ID NO: 1223 - RNA, 20 nt, Homo sapiens
  source 1..20: mol_type = genomic RNA
ggttttccagagcctcacct

SEQ ID NO: 1224 - RNA, 20 nt, Homo sapiens
  source 1..20: mol_type = genomic RNA
gttttccagagcctcacctc

SEQ ID NO: 1225 - RNA, 20 nt, Homo sapiens
  source 1..20: mol_type = genomic RNA
ttttccagagcctcacctct

SEQ ID NO: 1226 - RNA, 20 nt, Homo sapiens
  source 1..20: mol_type = genomic RNA
tttccagagcctcacctctc

SEQ ID NO: 1227 - RNA, 20 nt, Homo sapiens
  source 1..20: mol_type = genomic RNA
ttccagagcctcacctctcc

SEQ ID NO: 1228 - RNA, 20 nt, Homo sapiens
  source 1..20: mol_type = genomic RNA
tccagagcctcacctctcct

SEQ ID NO: 1229 - RNA, 20 nt, Homo sapiens
  source 1..20: mol_type = genomic RNA
ccagagcctcacctctcctg

SEQ ID NO: 1230 - RNA, 20 nt, Homo sapiens
  source 1..20: mol_type = genomic RNA
cagagcctcacctctcctgg

SEQ ID NO: 1231 - RNA, 20 nt, Homo sapiens
  source 1..20: mol_type = genomic RNA
agagcctcacctctcctggt

SEQ ID NO: 1232 - RNA, 20 nt, Homo sapiens
  source 1..20: mol_type = genomic RNA
gagcctcacctctcctggtt

SEQ ID NO: 1233 - RNA, 20 nt, Homo sapiens
  source 1..20: mol_type = genomic RNA
agcctcacctctcctggttg

SEQ ID NO: 1234 - RNA, 20 nt, Homo sapiens
  source 1..20: mol_type = genomic RNA
gcctcacctctcctggttgg

SEQ ID NO: 1235 - RNA, 20 nt, Homo sapiens
  source 1..20: mol_type = genomic RNA
cctcacctctcctggttgga

SEQ ID NO: 1236 - RNA, 20 nt, Homo sapiens
  source 1..20: mol_type = genomic RNA
ctcacctctcctggttggaa

SEQ ID NO: 1237 - RNA, 20 nt, Homo sapiens
  source 1..20: mol_type = genomic RNA
tcacctctcctggttggaaa

SEQ ID NO: 1238 - RNA, 20 nt, Homo sapiens
  source 1..20: mol_type = genomic RNA
cacctctcctggttggaaaa

SEQ ID NO: 1239 - RNA, 20 nt, Homo sapiens
  source 1..20: mol_type = genomic RNA
acctctcctggttggaaaat

SEQ ID NO: 1240 - RNA, 20 nt, Homo sapiens
  source 1..20: mol_type = genomic RNA
cctctcctggttggaaaatg

SEQ ID NO: 1241 - RNA, 20 nt, Homo sapiens
  source 1..20: mol_type = genomic RNA
ctctcctggttggaaaatgg

SEQ ID NO: 1242 - RNA, 20 nt, Homo sapiens
  source 1..20: mol_type = genomic RNA
tctcctggttggaaaatgga

SEQ ID NO: 1243 - RNA, 20 nt, Homo sapiens
  source 1..20: mol_type = genomic RNA
ctcctggttggaaaatggag

SEQ ID NO: 1244 - RNA, 20 nt, Homo sapiens
  source 1..20: mol_type = genomic RNA
tcctggttggaaaatggaga

SEQ ID NO: 1245 - RNA, 20 nt, Homo sapiens
  source 1..20: mol_type = genomic RNA
cctggttggaaaatggagaa

SEQ ID NO: 1246 - RNA, 20 nt, Homo sapiens
  source 1..20: mol_type = genomic RNA
ctggttggaaaatggagaag

SEQ ID NO: 1247 - RNA, 20 nt, Homo sapiens
  source 1..20: mol_type = genomic RNA
tggttggaaaatggagaaga

SEQ ID NO: 1248 - RNA, 20 nt, Homo sapiens
  source 1..20: mol_type = genomic RNA
ggttggaaaatggagaagaa

SEQ ID NO: 1249 - RNA, 20 nt, Homo sapiens
  source 1..20: mol_type = genomic RNA
gttggaaaatggagaagaat

SEQ ID NO: 1250 - RNA, 20 nt, Homo sapiens
  source 1..20: mol_type = genomic RNA
ttggaaaatggagaagaatt

SEQ ID NO: 1251 - RNA, 20 nt, Homo sapiens
  source 1..20: mol_type = genomic RNA
tggaaaatggagaagaatta

SEQ ID NO: 1252 - RNA, 20 nt, Homo sapiens
  source 1..20: mol_type = genomic RNA
ggaaaatggagaagaattaa

SEQ ID NO: 1253 - RNA, 20 nt, Homo sapiens
  source 1..20: mol_type = genomic RNA
gaaaatggagaagaattaaa

SEQ ID NO: 1254 - RNA, 20 nt, Homo sapiens
  source 1..20: mol_type = genomic RNA
aaaatggagaagaattaaat

SEQ ID NO: 1255 - RNA, 20 nt, Homo sapiens
  source 1..20: mol_type = genomic RNA
aaatggagaagaattaaatg

SEQ ID NO: 1256 - RNA, 20 nt, Homo sapiens
  source 1..20: mol_type = genomic RNA
aatggagaagaattaaatgc

SEQ ID NO: 1257 - RNA, 20 nt, Homo sapiens
  source 1..20: mol_type = genomic RNA
atggagaagaattaaatgcc

SEQ ID NO: 1258 - RNA, 20 nt, Homo sapiens
  source 1..20: mol_type = genomic RNA
tggagaagaattaaatgcca

SEQ ID NO: 1259 - RNA, 20 nt, Homo sapiens
  source 1..20: mol_type = genomic RNA
ggagaagaattaaatgccat

SEQ ID NO: 1260 - RNA, 20 nt, Homo sapiens
  source 1..20: mol_type = genomic RNA
gagaagaattaaatgccatc

SEQ ID NO: 1261 - RNA, 20 nt, Homo sapiens
  source 1..20: mol_type = genomic RNA
agaagaattaaatgccatca

SEQ ID NO: 1262 - RNA, 20 nt, Homo sapiens
  source 1..20: mol_type = genomic RNA
gaagaattaaatgccatcaa

SEQ ID NO: 1263 - RNA, 20 nt, Homo sapiens
  source 1..20: mol_type = genomic RNA
aagaattaaatgccatcaac

SEQ ID NO: 1264 - RNA, 20 nt, Homo sapiens
  source 1..20: mol_type = genomic RNA
agaattaaatgccatcaaca

SEQ ID NO: 1265 - RNA, 20 nt, Homo sapiens
  source 1..20: mol_type = genomic RNA
gaattaaatgccatcaacac

SEQ ID NO: 1266 - RNA, 20 nt, Homo sapiens
  source 1..20: mol_type = genomic RNA
aattaaatgccatcaacaca

SEQ ID NO: 1267 - RNA, 20 nt, Homo sapiens
  source 1..20: mol_type = genomic RNA
attaaatgccatcaacacaa

SEQ ID NO: 1268 - RNA, 20 nt, Homo sapiens
  source 1..20: mol_type = genomic RNA
ttaaatgccatcaacacaac

SEQ ID NO: 1269 - RNA, 20 nt, Homo sapiens
  source 1..20: mol_type = genomic RNA
taaatgccatcaacacaaca

SEQ ID NO: 1270 - RNA, 20 nt, Homo sapiens
  source 1..20: mol_type = genomic RNA
aaatgccatcaacacaacag

SEQ ID NO: 1271 - RNA, 20 nt, Homo sapiens
  source 1..20: mol_type = genomic RNA
aatgccatcaacacaacagt

SEQ ID NO: 1272 - RNA, 20 nt, Homo sapiens
  source 1..20: mol_type = genomic RNA
atgccatcaacacaacagtt

SEQ ID NO: 1273 - RNA, 20 nt, Homo sapiens
  source 1..20: mol_type = genomic RNA
tgccatcaacacaacagttt

SEQ ID NO: 1274 - RNA, 20 nt, Homo sapiens
  source 1..20: mol_type = genomic RNA
gccatcaacacaacagtttc

SEQ ID NO: 1275 - RNA, 20 nt, Homo sapiens
  source 1..20: mol_type = genomic RNA
ccatcaacacaacagtttcc

SEQ ID NO: 1276 - RNA, 20 nt, Homo sapiens
  source 1..20: mol_type = genomic RNA
catcaacacaacagtttccc

SEQ ID NO: 1277 - RNA, 20 nt, Homo sapiens
  source 1..20: mol_type = genomic RNA
atcaacacaacagtttccca

SEQ ID NO: 1278 - RNA, 20 nt, Homo sapiens
  source 1..20: mol_type = genomic RNA
tcaacacaacagtttcccaa

SEQ ID NO: 1279 - RNA, 20 nt, Homo sapiens
  source 1..20: mol_type = genomic RNA
caacacaacagtttcccaag

SEQ ID NO: 1280 - RNA, 20 nt, Homo sapiens
  source 1..20: mol_type = genomic RNA
aacacaacagtttcccaaga

SEQ ID NO: 1281 - RNA, 20 nt, Homo sapiens
  source 1..20: mol_type = genomic RNA
acacaacagtttcccaagat

SEQ ID NO: 1282 - RNA, 20 nt, Homo sapiens
  source 1..20: mol_type = genomic RNA
cacaacagtttcccaagatc

SEQ ID NO: 1283 - RNA, 20 nt, Homo sapiens
  source 1..20: mol_type = genomic RNA
acaacagtttcccaagatcc

SEQ ID NO: 1284 - RNA, 20 nt, Homo sapiens
  source 1..20: mol_type = genomic RNA
caacagtttcccaagatcct

SEQ ID NO: 1285 - RNA, 20 nt, Homo sapiens
  source 1..20: mol_type = genomic RNA
aacagtttcccaagatcctg

SEQ ID NO: 1286 - RNA, 20 nt, Homo sapiens
  source 1..20: mol_type = genomic RNA
acagtttcccaagatcctga

SEQ ID NO: 1287 - RNA, 20 nt, Homo sapiens
  source 1..20: mol_type = genomic RNA
cagtttcccaagatcctgaa

SEQ ID NO: 1288 - RNA, 20 nt, Homo sapiens
  source 1..20: mol_type = genomic RNA
agtttcccaagatcctgaaa

SEQ ID NO: 1289 - RNA, 20 nt, Homo sapiens
  source 1..20: mol_type = genomic RNA
gtttcccaagatcctgaaac

SEQ ID NO: 1290 - RNA, 20 nt, Homo sapiens
  source 1..20: mol_type = genomic RNA
tttcccaagatcctgaaact

SEQ ID NO: 1291 - RNA, 20 nt, Homo sapiens
  source 1..20: mol_type = genomic RNA
ttcccaagatcctgaaactg

SEQ ID NO: 1292 - RNA, 20 nt, Homo sapiens
  source 1..20: mol_type = genomic RNA
tcccaagatcctgaaactga

SEQ ID NO: 1293 - RNA, 20 nt, Homo sapiens
  source 1..20: mol_type = genomic RNA
cccaagatcctgaaactgag

SEQ ID NO: 1294 - RNA, 20 nt, Homo sapiens
  source 1..20: mol_type = genomic RNA
ccaagatcctgaaactgagc

SEQ ID NO: 1295 - RNA, 20 nt, Homo sapiens
  source 1..20: mol_type = genomic RNA
caagatcctgaaactgagct

SEQ ID NO: 1296 - RNA, 20 nt, Homo sapiens
  source 1..20: mol_type = genomic RNA
aagatcctgaaactgagctc

SEQ ID NO: 1297 - RNA, 20 nt, Homo sapiens
  source 1..20: mol_type = genomic RNA
agatcctgaaactgagctct

SEQ ID NO: 1298 - RNA, 20 nt, Homo sapiens
  source 1..20: mol_type = genomic RNA
gatcctgaaactgagctcta

SEQ ID NO: 1299 - RNA, 20 nt, Homo sapiens
  source 1..20: mol_type = genomic RNA
atcctgaaactgagctctat

SEQ ID NO: 1300 - RNA, 20 nt, Homo sapiens
  source 1..20: mol_type = genomic RNA
tcctgaaactgagctctatg

SEQ ID NO: 1301 - RNA, 20 nt, Homo sapiens
  source 1..20: mol_type = genomic RNA
cctgaaactgagctctatgc

SEQ ID NO: 1302 - RNA, 20 nt, Homo sapiens
  source 1..20: mol_type = genomic RNA
ctgaaactgagctctatgct

SEQ ID NO: 1303 - RNA, 20 nt, Homo sapiens
  source 1..20: mol_type = genomic RNA
tgaaactgagctctatgctg

SEQ ID NO: 1304 - RNA, 20 nt, Homo sapiens
  source 1..20: mol_type = genomic RNA
gaaactgagctctatgctgt

SEQ ID NO: 1305 - RNA, 20 nt, Homo sapiens
  source 1..20: mol_type = genomic RNA
aaactgagctctatgctgtt

SEQ ID NO: 1306 - RNA, 20 nt, Homo sapiens
  source 1..20: mol_type = genomic RNA
aactgagctctatgctgtta

SEQ ID NO: 1307 - RNA, 20 nt, Homo sapiens
  source 1..20: mol_type = genomic RNA
actgagctctatgctgttag

SEQ ID NO: 1308 - RNA, 20 nt, Homo sapiens
  source 1..20: mol_type = genomic RNA
ctgagctctatgctgttagc

SEQ ID NO: 1309 - RNA, 20 nt, Homo sapiens
  source 1..20: mol_type = genomic RNA
tgagctctatgctgttagca

SEQ ID NO: 1310 - RNA, 20 nt, Homo sapiens
  source 1..20: mol_type = genomic RNA
gagctctatgctgttagcag

SEQ ID NO: 1311 - RNA, 20 nt, Homo sapiens
  source 1..20: mol_type = genomic RNA
agctctatgctgttagcagc

SEQ ID NO: 1312 - RNA, 20 nt, Homo sapiens
  source 1..20: mol_type = genomic RNA
gctctatgctgttagcagca

SEQ ID NO: 1313 - RNA, 20 nt, Homo sapiens
  source 1..20: mol_type = genomic RNA
ctctatgctgttagcagcaa

SEQ ID NO: 1314 - RNA, 20 nt, Homo sapiens
  source 1..20: mol_type = genomic RNA
tctatgctgttagcagcaaa

SEQ ID NO: 1315 - RNA, 20 nt, Homo sapiens
  source 1..20: mol_type = genomic RNA
ctatgctgttagcagcaaac

SEQ ID NO: 1316 - RNA, 20 nt, Homo sapiens
  source 1..20: mol_type = genomic RNA
tatgctgttagcagcaaact

SEQ ID NO: 1317 - RNA, 20 nt, Homo sapiens
  source 1..20: mol_type = genomic RNA
atgctgttagcagcaaactg

SEQ ID NO: 1318 - RNA, 20 nt, Homo sapiens
  source 1..20: mol_type = genomic RNA
tgctgttagcagcaaactgg

SEQ ID NO: 1319 - RNA, 20 nt, Homo sapiens
  source 1..20: mol_type = genomic RNA
gctgttagcagcaaactgga

SEQ ID NO: 1320 - RNA, 20 nt, Homo sapiens
  source 1..20: mol_type = genomic RNA
ctgttagcagcaaactggat

SEQ ID NO: 1321 - RNA, 20 nt, Homo sapiens
  source 1..20: mol_type = genomic RNA
tgttagcagcaaactggatt

SEQ ID NO: 1322 - RNA, 20 nt, Homo sapiens
  source 1..20: mol_type = genomic RNA
gttagcagcaaactggattt

SEQ ID NO: 1323 - RNA, 20 nt, Homo sapiens
  source 1..20: mol_type = genomic RNA
ttagcagcaaactggatttc

SEQ ID NO: 1324 - RNA, 20 nt, Homo sapiens
  source 1..20: mol_type = genomic RNA
tagcagcaaactggatttca

SEQ ID NO: 1325 - RNA, 20 nt, Homo sapiens
  source 1..20: mol_type = genomic RNA
agcagcaaactggatttcaa

SEQ ID NO: 1326 - RNA, 20 nt, Homo sapiens
  source 1..20: mol_type = genomic RNA
gcagcaaactggatttcaat

SEQ ID NO: 1327 - RNA, 20 nt, Homo sapiens
  source 1..20: mol_type = genomic RNA
cagcaaactggatttcaata

SEQ ID NO: 1328 - RNA, 20 nt, Homo sapiens
  source 1..20: mol_type = genomic RNA
agcaaactggatttcaatat

SEQ ID NO: 1329 - RNA, 20 nt, Homo sapiens
  source 1..20: mol_type = genomic RNA
gcaaactggatttcaatatg

SEQ ID NO: 1330 - RNA, 20 nt, Homo sapiens
  source 1..20: mol_type = genomic RNA
caaactggatttcaatatga

SEQ ID NO: 1331 - RNA, 20 nt, Homo sapiens
  source 1..20: mol_type = genomic RNA
aaactggatttcaatatgac

SEQ ID NO: 1332 - RNA, 20 nt, Homo sapiens
  source 1..20: mol_type = genomic RNA
aactggatttcaatatgaca

SEQ ID NO: 1333 - RNA, 20 nt, Homo sapiens
  source 1..20: mol_type = genomic RNA
actggatttcaatatgacaa

SEQ ID NO: 1334 - RNA, 20 nt, Homo sapiens
  source 1..20: mol_type = genomic RNA
ctggatttcaatatgacaac

SEQ ID NO: 1335 - RNA, 20 nt, Homo sapiens
  source 1..20: mol_type = genomic RNA
tggatttcaatatgacaacc

SEQ ID NO: 1336 - RNA, 20 nt, Homo sapiens
  source 1..20: mol_type = genomic RNA
ggatttcaatatgacaacca

SEQ ID NO: 1337 - RNA, 20 nt, Homo sapiens
  source 1..20: mol_type = genomic RNA
gatttcaatatgacaaccaa

SEQ ID NO: 1338 - RNA, 20 nt, Homo sapiens
  source 1..20: mol_type = genomic RNA
atttcaatatgacaaccaac

SEQ ID NO: 1339 - RNA, 20 nt, Homo sapiens
  source 1..20: mol_type = genomic RNA
tttcaatatgacaaccaacc

SEQ ID NO: 1340 - RNA, 20 nt, Homo sapiens
  source 1..20: mol_type = genomic RNA
ttcaatatgacaaccaacca

SEQ ID NO: 1341 - RNA, 20 nt, Homo sapiens
  source 1..20: mol_type = genomic RNA
tcaatatgacaaccaaccac

SEQ ID NO: 1342 - RNA, 20 nt, Homo sapiens
  source 1..20: mol_type = genomic RNA
caatatgacaaccaaccaca

SEQ ID NO: 1343 - RNA, 20 nt, Homo sapiens
  source 1..20: mol_type = genomic RNA
aatatgacaaccaaccacag

SEQ ID NO: 1344 - RNA, 20 nt, Homo sapiens
  source 1..20: mol_type = genomic RNA
atatgacaaccaaccacagc

SEQ ID NO: 1345 - RNA, 20 nt, Homo sapiens
  source 1..20: mol_type = genomic RNA
tatgacaaccaaccacagct

SEQ ID NO: 1346 - RNA, 20 nt, Homo sapiens
  source 1..20: mol_type = genomic RNA
atgacaaccaaccacagctt

SEQ ID NO: 1347 - RNA, 20 nt, Homo sapiens
  source 1..20: mol_type = genomic RNA
tgacaaccaaccacagcttc

SEQ ID NO: 1348 - RNA, 20 nt, Homo sapiens
  source 1..20: mol_type = genomic RNA
gacaaccaaccacagcttca

SEQ ID NO: 1349 - RNA, 20 nt, Homo sapiens
  source 1..20: mol_type = genomic RNA
acaaccaaccacagcttcat

SEQ ID NO: 1350 - RNA, 20 nt, Homo sapiens
  source 1..20: mol_type = genomic RNA
caaccaaccacagcttcatg

SEQ ID NO: 1351 - RNA, 20 nt, Homo sapiens
  source 1..20: mol_type = genomic RNA
aaccaaccacagcttcatgt

SEQ ID NO: 1352 - RNA, 20 nt, Homo sapiens
  source 1..20: mol_type = genomic RNA
accaaccacagcttcatgtg

SEQ ID NO: 1353 - RNA, 20 nt, Homo sapiens
  source 1..20: mol_type = genomic RNA
ccaaccacagcttcatgtgt

SEQ ID NO: 1354 - RNA, 20 nt, Homo sapiens
  source 1..20: mol_type = genomic RNA
caaccacagcttcatgtgtc

SEQ ID NO: 1355 - RNA, 20 nt, Homo sapiens
  source 1..20: mol_type = genomic RNA
aaccacagcttcatgtgtct

SEQ ID NO: 1356 - RNA, 20 nt, Homo sapiens
  source 1..20: mol_type = genomic RNA
accacagcttcatgtgtctc

SEQ ID NO: 1357 - RNA, 20 nt, Homo sapiens
  source 1..20: mol_type = genomic RNA
ccacagcttcatgtgtctca

SEQ ID NO: 1358 - RNA, 20 nt, Homo sapiens
  source 1..20: mol_type = genomic RNA
cacagcttcatgtgtctcat

SEQ ID NO: 1359 - RNA, 20 nt, Homo sapiens
  source 1..20: mol_type = genomic RNA
acagcttcatgtgtctcatc

SEQ ID NO: 1360 - RNA, 20 nt, Homo sapiens
  source 1..20: mol_type = genomic RNA
cagcttcatgtgtctcatca

SEQ ID NO: 1361 - RNA, 20 nt, Homo sapiens
  source 1..20: mol_type = genomic RNA
agcttcatgtgtctcatcaa

SEQ ID NO: 1362 - RNA, 20 nt, Homo sapiens
  source 1..20: mol_type = genomic RNA
gcttcatgtgtctcatcaag

SEQ ID NO: 1363 - RNA, 20 nt, Homo sapiens
  source 1..20: mol_type = genomic RNA
cttcatgtgtctcatcaagt

SEQ ID NO: 1364 - RNA, 20 nt, Homo sapiens
  source 1..20: mol_type = genomic RNA
ttcatgtgtctcatcaagta

SEQ ID NO: 1365 - RNA, 20 nt, Homo sapiens
  source 1..20: mol_type = genomic RNA
tcatgtgtctcatcaagtat

SEQ ID NO: 1366 - RNA, 20 nt, Homo sapiens
  source 1..20: mol_type = genomic RNA
catgtgtctcatcaagtatg

SEQ ID NO: 1367 - RNA, 20 nt, Homo sapiens
  source 1..20: mol_type = genomic RNA
atgtgtctcatcaagtatgg

SEQ ID NO: 1368 - RNA, 20 nt, Homo sapiens
  source 1..20: mol_type = genomic RNA
tgtgtctcatcaagtatgga

SEQ ID NO: 1369 - RNA, 20 nt, Homo sapiens
  source 1..20: mol_type = genomic RNA
gtgtctcatcaagtatggac

SEQ ID NO: 1370 - RNA, 20 nt, Homo sapiens
  source 1..20: mol_type = genomic RNA
tgtctcatcaagtatggaca

SEQ ID NO: 1371 - RNA, 20 nt, Homo sapiens
  source 1..20: mol_type = genomic RNA
gtctcatcaagtatggacat

SEQ ID NO: 1372 - RNA, 20 nt, Homo sapiens
  source 1..20: mol_type = genomic RNA
tctcatcaagtatggacatt

SEQ ID NO: 1373 - RNA, 20 nt, Homo sapiens
  source 1..20: mol_type = genomic RNA
ctcatcaagtatggacattt

SEQ ID NO: 1374 - RNA, 20 nt, Homo sapiens
  source 1..20: mol_type = genomic RNA
tcatcaagtatggacattta

SEQ ID NO: 1375 - RNA, 20 nt, Homo sapiens
  source 1..20: mol_type = genomic RNA
catcaagtatggacatttaa

SEQ ID NO: 1376 - RNA, 20 nt, Homo sapiens
  source 1..20: mol_type = genomic RNA
atcaagtatggacatttaag

SEQ ID NO: 1377 - RNA, 20 nt, Homo sapiens
  source 1..20: mol_type = genomic RNA
tcaagtatggacatttaaga

SEQ ID NO: 1378 - RNA, 20 nt, Homo sapiens
  source 1..20: mol_type = genomic RNA
caagtatggacatttaagag

SEQ ID NO: 1379 - RNA, 20 nt, Homo sapiens
  source 1..20: mol_type = genomic RNA
aagtatggacatttaagagt

SEQ ID NO: 1380 - RNA, 20 nt, Homo sapiens
  source 1..20: mol_type = genomic RNA
agtatggacatttaagagtg

SEQ ID NO: 1381 - RNA, 20 nt, Homo sapiens
  source 1..20: mol_type = genomic RNA
gtatggacatttaagagtga

SEQ ID NO: 1382 - RNA, 20 nt, Homo sapiens
  source 1..20: mol_type = genomic RNA
tatggacatttaagagtgaa

SEQ ID NO: 1383 - RNA, 20 nt, Homo sapiens
  source 1..20: mol_type = genomic RNA
atggacatttaagagtgaat

SEQ ID NO: 1384 - RNA, 20 nt, Homo sapiens
  source 1..20: mol_type = genomic RNA
tggacatttaagagtgaatc

SEQ ID NO: 1385 - RNA, 20 nt, Homo sapiens
  source 1..20: mol_type = genomic RNA
ggacatttaagagtgaatca

SEQ ID NO: 1386 - RNA, 20 nt, Homo sapiens
  source 1..20: mol_type = genomic RNA
gacatttaagagtgaatcag

SEQ ID NO: 1387 - RNA, 20 nt, Homo sapiens
  source 1..20: mol_type = genomic RNA
acatttaagagtgaatcaga

SEQ ID NO: 1388 - RNA, 20 nt, Homo sapiens
  source 1..20: mol_type = genomic RNA
catttaagagtgaatcagac

SEQ ID NO: 1389 - RNA, 20 nt, Homo sapiens
  source 1..20: mol_type = genomic RNA
atttaagagtgaatcagacc

SEQ ID NO: 1390 - RNA, 20 nt, Homo sapiens
  source 1..20: mol_type = genomic RNA
tttaagagtgaatcagacct

SEQ ID NO: 1391 - RNA, 20 nt, Homo sapiens
  source 1..20: mol_type = genomic RNA
ttaagagtgaatcagacctt

SEQ ID NO: 1392 - RNA, 20 nt, Homo sapiens
  source 1..20: mol_type = genomic RNA
taagagtgaatcagaccttc

SEQ ID NO: 1393 - RNA, 20 nt, Homo sapiens
  source 1..20: mol_type = genomic RNA
aagagtgaatcagaccttca

SEQ ID NO: 1394 - RNA, 20 nt, Homo sapiens
  source 1..20: mol_type = genomic RNA
agagtgaatcagaccttcaa

SEQ ID NO: 1395 - RNA, 20 nt, Homo sapiens
  source 1..20: mol_type = genomic RNA
gagtgaatcagaccttcaac

SEQ ID NO: 1396 - RNA, 20 nt, Homo sapiens
  source 1..20: mol_type = genomic RNA
agtgaatcagaccttcaact

SEQ ID NO: 1397 - RNA, 20 nt, Homo sapiens
  source 1..20: mol_type = genomic RNA
gtgaatcagaccttcaactg

SEQ ID NO: 1398 - RNA, 20 nt, Homo sapiens
  source 1..20: mol_type = genomic RNA
tgaatcagaccttcaactgg

SEQ ID NO: 1399 - RNA, 20 nt, Homo sapiens
  source 1..20: mol_type = genomic RNA
gaatcagaccttcaactgga

SEQ ID NO: 1400 - RNA, 20 nt, Homo sapiens
  source 1..20: mol_type = genomic RNA
aatcagaccttcaactggaa

SEQ ID NO: 1401 - RNA, 20 nt, Homo sapiens
  source 1..20: mol_type = genomic RNA
atcagaccttcaactggaat

SEQ ID NO: 1402 - RNA, 20 nt, Homo sapiens
  source 1..20: mol_type = genomic RNA
tcagaccttcaactggaata

SEQ ID NO: 1403 - RNA, 20 nt, Homo sapiens
  source 1..20: mol_type = genomic RNA
cagaccttcaactggaatac

SEQ ID NO: 1404 - RNA, 20 nt, Homo sapiens
  source 1..20: mol_type = genomic RNA
agaccttcaactggaataca

SEQ ID NO: 1405 - RNA, 20 nt, Homo sapiens
  source 1..20: mol_type = genomic RNA
gaccttcaactggaatacaa

SEQ ID NO: 1406 - RNA, 20 nt, Homo sapiens
  source 1..20: mol_type = genomic RNA
accttcaactggaatacaac

SEQ ID NO: 1407 - RNA, 20 nt, Homo sapiens
  source 1..20: mol_type = genomic RNA
ccttcaactggaatacaacc

SEQ ID NO: 1408 - RNA, 20 nt, Homo sapiens
  source 1..20: mol_type = genomic RNA
cttcaactggaatacaacca

SEQ ID NO: 1409 - RNA, 20 nt, Homo sapiens
  source 1..20: mol_type = genomic RNA
ttcaactggaatacaaccaa

SEQ ID NO: 1410 - RNA, 20 nt, Homo sapiens
  source 1..20: mol_type = genomic RNA
tcaactggaatacaaccaag

SEQ ID NO: 1411 - RNA, 20 nt, Homo sapiens
  source 1..20: mol_type = genomic RNA
caactggaatacaaccaagc

SEQ ID NO: 1412 - RNA, 20 nt, Homo sapiens
  source 1..20: mol_type = genomic RNA
aactggaatacaaccaagca

SEQ ID NO: 1413 - RNA, 20 nt, Homo sapiens
  source 1..20: mol_type = genomic RNA
actggaatacaaccaagcaa

SEQ ID NO: 1414 - RNA, 20 nt, Homo sapiens
  source 1..20: mol_type = genomic RNA
ctggaatacaaccaagcaag

SEQ ID NO: 1415 - RNA, 20 nt, Homo sapiens
  source 1..20: mol_type = genomic RNA
tggaatacaaccaagcaaga

SEQ ID NO: 1416 - RNA, 20 nt, Homo sapiens
  source 1..20: mol_type = genomic RNA
ggaatacaaccaagcaagag

SEQ ID NO: 1417 - RNA, 20 nt, Homo sapiens
  source 1..20: mol_type = genomic RNA
gaatacaaccaagcaagagc

SEQ ID NO: 1418 - RNA, 20 nt, Homo sapiens
  source 1..20: mol_type = genomic RNA
aatacaaccaagcaagagca

SEQ ID NO: 1419 - RNA, 20 nt, Homo sapiens
  source 1..20: mol_type = genomic RNA
atacaaccaagcaagagcat

SEQ ID NO: 1420 - RNA, 20 nt, Homo sapiens
  source 1..20: mol_type = genomic RNA
tacaaccaagcaagagcatt

SEQ ID NO: 1421 - RNA, 20 nt, Homo sapiens
  source 1..20: mol_type = genomic RNA
acaaccaagcaagagcattt

SEQ ID NO: 1422 - RNA, 20 nt, Homo sapiens
  source 1..20: mol_type = genomic RNA
caaccaagcaagagcatttt

SEQ ID NO: 1423 - RNA, 20 nt, Homo sapiens
  source 1..20: mol_type = genomic RNA
aaccaagcaagagcattttc

SEQ ID NO: 1424 - RNA, 20 nt, Homo sapiens
  source 1..20: mol_type = genomic RNA
accaagcaagagcattttcc

SEQ ID NO: 1425 - RNA, 20 nt, Homo sapiens
  source 1..20: mol_type = genomic RNA
ccaagcaagagcattttcct

SEQ ID NO: 1426 - RNA, 20 nt, Homo sapiens
  source 1..20: mol_type = genomic RNA
caagcaagagcattttcctg

SEQ ID NO: 1427 - RNA, 20 nt, Homo sapiens
  source 1..20: mol_type = genomic RNA
aagcaagagcattttcctga

SEQ ID NO: 1428 - RNA, 20 nt, Homo sapiens
  source 1..20: mol_type = genomic RNA
agcaagagcattttcctgat

SEQ ID NO: 1429 - RNA, 20 nt, Homo sapiens
  source 1..20: mol_type = genomic RNA
gcaagagcattttcctgata

SEQ ID NO: 1430 - RNA, 20 nt, Homo sapiens
  source 1..20: mol_type = genomic RNA
caagagcattttcctgataa

SEQ ID NO: 1431 - RNA, 20 nt, Homo sapiens
  source 1..20: mol_type = genomic RNA
aagagcattttcctgataac

SEQ ID NO: 1432 - RNA, 20 nt, Homo sapiens
  source 1..20: mol_type = genomic RNA
agagcattttcctgataacc

SEQ ID NO: 1433 - RNA, 20 nt, Homo sapiens
  source 1..20: mol_type = genomic RNA
gagcattttcctgataacct

SEQ ID NO: 1434 - RNA, 20 nt, Homo sapiens
  source 1..20: mol_type = genomic RNA
agcattttcctgataacctg

SEQ ID NO: 1435 - RNA, 20 nt, Homo sapiens
  source 1..20: mol_type = genomic RNA
gcattttcctgataacctgc

SEQ ID NO: 1436 - RNA, 20 nt, Homo sapiens
  source 1..20: mol_type = genomic RNA
cattttcctgataacctgct

SEQ ID NO: 1437 - RNA, 20 nt, Homo sapiens
  source 1..20: mol_type = genomic RNA
attttcctgataacctgctc

SEQ ID NO: 1438 - RNA, 20 nt, Homo sapiens
  source 1..20: mol_type = genomic RNA
ttttcctgataacctgctcc

SEQ ID NO: 1439 - RNA, 20 nt, Homo sapiens
  source 1..20: mol_type = genomic RNA
tttcctgataacctgctccc

SEQ ID NO: 1440 - RNA, 20 nt, Homo sapiens
  source 1..20: mol_type = genomic RNA
ttcctgataacctgctccca

SEQ ID NO: 1441 - RNA, 20 nt, Homo sapiens
  source 1..20: mol_type = genomic RNA
tcctgataacctgctcccat

SEQ ID NO: 1442 - RNA, 20 nt, Homo sapiens
  source 1..20: mol_type = genomic RNA
cctgataacctgctcccatc

SEQ ID NO: 1443 - RNA, 20 nt, Homo sapiens
  source 1..20: mol_type = genomic RNA
ctgataacctgctcccatcc

SEQ ID NO: 1444 - RNA, 20 nt, Homo sapiens
  source 1..20: mol_type = genomic RNA
tgataacctgctcccatcct

SEQ ID NO: 1445 - RNA, 20 nt, Homo sapiens
  source 1..20: mol_type = genomic RNA
gataacctgctcccatcctg

SEQ ID NO: 1446 - RNA, 20 nt, Homo sapiens
  source 1..20: mol_type = genomic RNA
ataacctgctcccatcctgg

SEQ ID NO: 1447 - RNA, 20 nt, Homo sapiens
  source 1..20: mol_type = genomic RNA
taacctgctcccatcctggg

SEQ ID NO: 1448 - RNA, 20 nt, Homo sapiens
  source 1..20: mol_type = genomic RNA
aacctgctcccatcctgggc

SEQ ID NO: 1449 - RNA, 20 nt, Homo sapiens
  source 1..20: mol_type = genomic RNA
acctgctcccatcctgggcc

SEQ ID NO: 1450 - RNA, 20 nt, Homo sapiens
  source 1..20: mol_type = genomic RNA
cctgctcccatcctgggcca

SEQ ID NO: 1451 - RNA, 20 nt, Homo sapiens
  source 1..20: mol_type = genomic RNA
ctgctcccatcctgggccat

SEQ ID NO: 1452 - RNA, 20 nt, Homo sapiens
  source 1..20: mol_type = genomic RNA
tgctcccatcctgggccatt

SEQ ID NO: 1453 - RNA, 20 nt, Homo sapiens
  source 1..20: mol_type = genomic RNA
gctcccatcctgggccatta

SEQ ID NO: 1454 - RNA, 20 nt, Homo sapiens
  source 1..20: mol_type = genomic RNA
ctcccatcctgggccattac

SEQ ID NO: 1455 - RNA, 20 nt, Homo sapiens
  source 1..20: mol_type = genomic RNA
tcccatcctgggccattacc

SEQ ID NO: 1456 - RNA, 20 nt, Homo sapiens
  source 1..20: mol_type = genomic RNA
cccatcctgggccattacct

SEQ ID NO: 1457 - RNA, 20 nt, Homo sapiens
  source 1..20: mol_type = genomic RNA
ccatcctgggccattacctt

SEQ ID NO: 1458 - RNA, 20 nt, Homo sapiens
  source 1..20: mol_type = genomic RNA
catcctgggccattacctta

SEQ ID NO: 1459 - RNA, 20 nt, Homo sapiens
  source 1..20: mol_type = genomic RNA
atcctgggccattaccttaa

SEQ ID NO: 1460 - RNA, 20 nt, Homo sapiens
  source 1..20: mol_type = genomic RNA
tcctgggccattaccttaat

SEQ ID NO: 1461 - RNA, 20 nt, Homo sapiens
  source 1..20: mol_type = genomic RNA
cctgggccattaccttaatc

SEQ ID NO: 1462 - RNA, 20 nt, Homo sapiens
  source 1..20: mol_type = genomic RNA
ctgggccattaccttaatct

SEQ ID NO: 1463 - RNA, 20 nt, Homo sapiens
  source 1..20: mol_type = genomic RNA
tgggccattaccttaatctc

SEQ ID NO: 1464 - RNA, 20 nt, Homo sapiens
  source 1..20: mol_type = genomic RNA
gggccattaccttaatctca

SEQ ID NO: 1465 - RNA, 20 nt, Homo sapiens
  source 1..20: mol_type = genomic RNA
ggccattaccttaatctcag

SEQ ID NO: 1466 - RNA, 20 nt, Homo sapiens
  source 1..20: mol_type = genomic RNA
gccattaccttaatctcagt

SEQ ID NO: 1467 - RNA, 20 nt, Homo sapiens
  source 1..20: mol_type = genomic RNA
ccattaccttaatctcagta

SEQ ID NO: 1468 - RNA, 20 nt, Homo sapiens
  source 1..20: mol_type = genomic RNA
cattaccttaatctcagtaa

SEQ ID NO: 1469 - RNA, 20 nt, Homo sapiens
  source 1..20: mol_type = genomic RNA
attaccttaatctcagtaaa

SEQ ID NO: 1470 - RNA, 20 nt, Homo sapiens
  source 1..20: mol_type = genomic RNA
ttaccttaatctcagtaaat

SEQ ID NO: 1471 - RNA, 20 nt, Homo sapiens
  source 1..20: mol_type = genomic RNA
taccttaatctcagtaaatg

SEQ ID NO: 1472 - RNA, 20 nt, Homo sapiens
  source 1..20: mol_type = genomic RNA
accttaatctcagtaaatgg

SEQ ID NO: 1473 - RNA, 20 nt, Homo sapiens
  source 1..20: mol_type = genomic RNA
ccttaatctcagtaaatgga

SEQ ID NO: 1474 - RNA, 20 nt, Homo sapiens
  source 1..20: mol_type = genomic RNA
cttaatctcagtaaatggaa

SEQ ID NO: 1475 - RNA, 20 nt, Homo sapiens
  source 1..20: mol_type = genomic RNA
ttaatctcagtaaatggaat

SEQ ID NO: 1476 - RNA, 20 nt, Homo sapiens
  source 1..20: mol_type = genomic RNA
taatctcagtaaatggaatt

SEQ ID NO: 1477 - RNA, 20 nt, Homo sapiens
  source 1..20: mol_type = genomic RNA
aatctcagtaaatggaattt

SEQ ID NO: 1478 - RNA, 20 nt, Homo sapiens
  source 1..20: mol_type = genomic RNA
atctcagtaaatggaatttt

SEQ ID NO: 1479 - RNA, 20 nt, Homo sapiens
  source 1..20: mol_type = genomic RNA
tctcagtaaatggaattttt

SEQ ID NO: 1480 - RNA, 20 nt, Homo sapiens
  source 1..20: mol_type = genomic RNA
ctcagtaaatggaatttttg

SEQ ID NO: 1481 - RNA, 20 nt, Homo sapiens
  source 1..20: mol_type = genomic RNA
tcagtaaatggaatttttgt

SEQ ID NO: 1482 - RNA, 20 nt, Homo sapiens
  source 1..20: mol_type = genomic RNA
cagtaaatggaatttttgtg

SEQ ID NO: 1483 - RNA, 20 nt, Homo sapiens
  source 1..20: mol_type = genomic RNA
agtaaatggaatttttgtga

SEQ ID NO: 1484 - RNA, 20 nt, Homo sapiens
  source 1..20: mol_type = genomic RNA
gtaaatggaatttttgtgat

SEQ ID NO: 1485 - RNA, 20 nt, Homo sapiens
  source 1..20: mol_type = genomic RNA
taaatggaatttttgtgata

SEQ ID NO: 1486 - RNA, 20 nt, Homo sapiens
  source 1..20: mol_type = genomic RNA
aaatggaatttttgtgatat

SEQ ID NO: 1487 - RNA, 20 nt, Homo sapiens
  source 1..20: mol_type = genomic RNA
aatggaatttttgtgatatg

SEQ ID NO: 1488 - RNA, 20 nt, Homo sapiens
  source 1..20: mol_type = genomic RNA
atggaatttttgtgatatgc

SEQ ID NO: 1489 - RNA, 20 nt, Homo sapiens
  source 1..20: mol_type = genomic RNA
tggaatttttgtgatatgct

SEQ ID NO: 1490 - RNA, 20 nt, Homo sapiens
  source 1..20: mol_type = genomic RNA
ggaatttttgtgatatgctg

SEQ ID NO: 1491 - RNA, 20 nt, Homo sapiens
  source 1..20: mol_type = genomic RNA
gaatttttgtgatatgctgc

SEQ ID NO: 1492 - RNA, 20 nt, Homo sapiens
  source 1..20: mol_type = genomic RNA
aatttttgtgatatgctgcc

SEQ ID NO: 1493 - RNA, 20 nt, Homo sapiens
  source 1..20: mol_type = genomic RNA
atttttgtgatatgctgcct

SEQ ID NO: 1494 - RNA, 20 nt, Homo sapiens
  source 1..20: mol_type = genomic RNA
tttttgtgatatgctgcctg

SEQ ID NO: 1495 - RNA, 20 nt, Homo sapiens
  source 1..20: mol_type = genomic RNA
ttttgtgatatgctgcctga

SEQ ID NO: 1496 - RNA, 20 nt, Homo sapiens
  source 1..20: mol_type = genomic RNA
tttgtgatatgctgcctgac

SEQ ID NO: 1497 - RNA, 20 nt, Homo sapiens
  source 1..20: mol_type = genomic RNA
ttgtgatatgctgcctgacc

SEQ ID NO: 1498 - RNA, 20 nt, Homo sapiens
  source 1..20: mol_type = genomic RNA
tgtgatatgctgcctgacct

SEQ ID NO: 1499 - RNA, 20 nt, Homo sapiens
  source 1..20: mol_type = genomic RNA
gtgatatgctgcctgaccta

SEQ ID NO: 1500 - RNA, 20 nt, Homo sapiens
  source 1..20: mol_type = genomic RNA
tgatatgctgcctgacctac

SEQ ID NO: 1501 - RNA, 20 nt, Homo sapiens
  source 1..20: mol_type = genomic RNA
gatatgctgcctgacctact

SEQ ID NO: 1502 - RNA, 20 nt, Homo sapiens
  source 1..20: mol_type = genomic RNA
atatgctgcctgacctactg

SEQ ID NO: 1503 - RNA, 20 nt, Homo sapiens
  source 1..20: mol_type = genomic RNA
tatgctgcctgacctactgc

SEQ ID NO: 1504 - RNA, 20 nt, Homo sapiens
  source 1..20: mol_type = genomic RNA
atgctgcctgacctactgct

SEQ ID NO: 1505 - RNA, 20 nt, Homo sapiens
  source 1..20: mol_type = genomic RNA
tgctgcctgacctactgctt

SEQ ID NO: 1506 - RNA, 20 nt, Homo sapiens
  source 1..20: mol_type = genomic RNA
gctgcctgacctactgcttt

SEQ ID NO: 1507 - RNA, 20 nt, Homo sapiens
  source 1..20: mol_type = genomic RNA
ctgcctgacctactgctttg

SEQ ID NO: 1508 - RNA, 20 nt, Homo sapiens
  source 1..20: mol_type = genomic RNA
tgcctgacctactgctttgc

SEQ ID NO: 1509 - RNA, 20 nt, Homo sapiens
  source 1..20: mol_type = genomic RNA
gcctgacctactgctttgcc

SEQ ID NO: 1510 - RNA, 20 nt, Homo sapiens
  source 1..20: mol_type = genomic RNA
cctgacctactgctttgccc

SEQ ID NO: 1511 - RNA, 20 nt, Homo sapiens
  source 1..20: mol_type = genomic RNA
ctgacctactgctttgcccc

SEQ ID NO: 1512 - RNA, 20 nt, Homo sapiens
  source 1..20: mol_type = genomic RNA
tgacctactgctttgcccca

SEQ ID NO: 1513 - RNA, 20 nt, Homo sapiens
  source 1..20: mol_type = genomic RNA
gacctactgctttgccccaa

SEQ ID NO: 1514 - RNA, 20 nt, Homo sapiens
  source 1..20: mol_type = genomic RNA
acctactgctttgccccaag

SEQ ID NO: 1515 - RNA, 20 nt, Homo sapiens
  source 1..20: mol_type = genomic RNA
cctactgctttgccccaaga

SEQ ID NO: 1516 - RNA, 20 nt, Homo sapiens
  source 1..20: mol_type = genomic RNA
ctactgctttgccccaagat

SEQ ID NO: 1517 - RNA, 20 nt, Homo sapiens
  source 1..20: mol_type = genomic RNA
tactgctttgccccaagatg

SEQ ID NO: 1518 - RNA, 20 nt, Homo sapiens
  source 1..20: mol_type = genomic RNA
actgctttgccccaagatgc

SEQ ID NO: 1519 - RNA, 20 nt, Homo sapiens
  source 1..20: mol_type = genomic RNA
ctgctttgccccaagatgca

SEQ ID NO: 1520 - RNA, 20 nt, Homo sapiens
  source 1..20: mol_type = genomic RNA
tgctttgccccaagatgcag

SEQ ID NO: 1521 - RNA, 20 nt, Homo sapiens
  source 1..20: mol_type = genomic RNA
gctttgccccaagatgcaga

SEQ ID NO: 1522 - RNA, 20 nt, Homo sapiens
  source 1..20: mol_type = genomic RNA
ctttgccccaagatgcagag

SEQ ID NO: 1523 - RNA, 20 nt, Homo sapiens
  source 1..20: mol_type = genomic RNA
tttgccccaagatgcagaga

SEQ ID NO: 1524 - RNA, 20 nt, Homo sapiens
  source 1..20: mol_type = genomic RNA
ttgccccaagatgcagagag

SEQ ID NO: 1525 - RNA, 20 nt, Homo sapiens
  source 1..20: mol_type = genomic RNA
tgccccaagatgcagagaga

SEQ ID NO: 1526 - RNA, 20 nt, Homo sapiens
  source 1..20: mol_type = genomic RNA
gccccaagatgcagagagag

SEQ ID NO: 1527 - RNA, 20 nt, Homo sapiens
  source 1..20: mol_type = genomic RNA
ccccaagatgcagagagaga

SEQ ID NO: 1528 - RNA, 20 nt, Homo sapiens
  source 1..20: mol_type = genomic RNA
cccaagatgcagagagagaa

SEQ ID NO: 1529 - RNA, 20 nt, Homo sapiens
  source 1..20: mol_type = genomic RNA
ccaagatgcagagagagaag

SEQ ID NO: 1530 - RNA, 20 nt, Homo sapiens
  source 1..20: mol_type = genomic RNA
caagatgcagagagagaagg

SEQ ID NO: 1531 - RNA, 20 nt, Homo sapiens
  source 1..20: mol_type = genomic RNA
aagatgcagagagagaagga

SEQ ID NO: 1532 - RNA, 20 nt, Homo sapiens
  source 1..20: mol_type = genomic RNA
agatgcagagagagaaggag

SEQ ID NO: 1533 - RNA, 20 nt, Homo sapiens
  source 1..20: mol_type = genomic RNA
gatgcagagagagaaggagg

SEQ ID NO: 1534 - RNA, 20 nt, Homo sapiens
  source 1..20: mol_type = genomic RNA
atgcagagagagaaggagga

SEQ ID NO: 1535 - RNA, 20 nt, Homo sapiens
  source 1..20: mol_type = genomic RNA
tgcagagagagaaggaggaa

SEQ ID NO: 1536 - RNA, 20 nt, Homo sapiens
  source 1..20: mol_type = genomic RNA
gcagagagagaaggaggaat

SEQ ID NO: 1537 - RNA, 20 nt, Homo sapiens
  source 1..20: mol_type = genomic RNA
cagagagagaaggaggaatg

SEQ ID NO: 1538 - RNA, 20 nt, Homo sapiens
  source 1..20: mol_type = genomic RNA
agagagagaaggaggaatga

SEQ ID NO: 1539 - RNA, 20 nt, Homo sapiens
  source 1..20: mol_type = genomic RNA
gagagagaaggaggaatgag

SEQ ID NO: 1540 - RNA, 20 nt, Homo sapiens
  source 1..20: mol_type = genomic RNA
agagagaaggaggaatgaga

SEQ ID NO: 1541 - RNA, 20 nt, Homo sapiens
  source 1..20: mol_type = genomic RNA
gagagaaggaggaatgagag

SEQ ID NO: 1542 - RNA, 20 nt, Homo sapiens
  source 1..20: mol_type = genomic RNA
agagaaggaggaatgagaga

SEQ ID NO: 1543 - RNA, 20 nt, Homo sapiens
  source 1..20: mol_type = genomic RNA
gagaaggaggaatgagagat

SEQ ID NO: 1544 - RNA, 20 nt, Homo sapiens
  source 1..20: mol_type = genomic RNA
agaaggaggaatgagagatt

SEQ ID NO: 1545 - RNA, 20 nt, Homo sapiens
  source 1..20: mol_type = genomic RNA
gaaggaggaatgagagattg

SEQ ID NO: 1546 - RNA, 20 nt, Homo sapiens
  source 1..20: mol_type = genomic RNA
aaggaggaatgagagattga

SEQ ID NO: 1547 - RNA, 20 nt, Homo sapiens
  source 1..20: mol_type = genomic RNA
aggaggaatgagagattgag

SEQ ID NO: 1548 - RNA, 20 nt, Homo sapiens
  source 1..20: mol_type = genomic RNA
ggaggaatgagagattgaga

SEQ ID NO: 1549 - RNA, 20 nt, Homo sapiens
  source 1..20: mol_type = genomic RNA
gaggaatgagagattgagaa

SEQ ID NO: 1550 - RNA, 20 nt, Homo sapiens
  source 1..20: mol_type = genomic RNA
aggaatgagagattgagaag

SEQ ID NO: 1551 - RNA, 20 nt, Homo sapiens
  source 1..20: mol_type = genomic RNA
ggaatgagagattgagaagg

SEQ ID NO: 1552 - RNA, 20 nt, Homo sapiens
  source 1..20: mol_type = genomic RNA
gaatgagagattgagaaggg

SEQ ID NO: 1553 - RNA, 20 nt, Homo sapiens
  source 1..20: mol_type = genomic RNA
aatgagagattgagaaggga

SEQ ID NO: 1554 - RNA, 20 nt, Homo sapiens
  source 1..20: mol_type = genomic RNA
atgagagattgagaagggaa

SEQ ID NO: 1555 - RNA, 20 nt, Homo sapiens
  source 1..20: mol_type = genomic RNA
tgagagattgagaagggaaa

SEQ ID NO: 1556 - RNA, 20 nt, Homo sapiens
  source 1..20: mol_type = genomic RNA
gagagattgagaagggaaag

SEQ ID NO: 1557 - RNA, 20 nt, Homo sapiens
  source 1..20: mol_type = genomic RNA
agagattgagaagggaaagt

SEQ ID NO: 1558 - RNA, 20 nt, Homo sapiens
  source 1..20: mol_type = genomic RNA
gagattgagaagggaaagtg

SEQ ID NO: 1559 - RNA, 20 nt, Homo sapiens
  source 1..20: mol_type = genomic RNA
agattgagaagggaaagtgt

SEQ ID NO: 1560 - RNA, 20 nt, Homo sapiens
  source 1..20: mol_type = genomic RNA
gattgagaagggaaagtgta

SEQ ID NO: 1561 - RNA, 20 nt, Homo sapiens
  source 1..20: mol_type = genomic RNA
attgagaagggaaagtgtac

SEQ ID NO: 1562 - RNA, 20 nt, Homo sapiens
  source 1..20: mol_type = genomic RNA
ttgagaagggaaagtgtacg

SEQ ID NO: 1563 - RNA, 20 nt, Homo sapiens
  source 1..20: mol_type = genomic RNA
tgagaagggaaagtgtacgc

SEQ ID NO: 1564 - RNA, 20 nt, Homo sapiens
  source 1..20: mol_type = genomic RNA
gagaagggaaagtgtacgcc

SEQ ID NO: 1565 - RNA, 20 nt, Homo sapiens
  source 1..20: mol_type = genomic RNA
agaagggaaagtgtacgccc

SEQ ID NO: 1566 - RNA, 20 nt, Homo sapiens
  source 1..20: mol_type = genomic RNA
gaagggaaagtgtacgccct

SEQ ID NO: 1567 - RNA, 20 nt, Homo sapiens
  source 1..20: mol_type = genomic RNA
aagggaaagtgtacgccctg

SEQ ID NO: 1568 - RNA, 20 nt, Homo sapiens
  source 1..20: mol_type = genomic RNA
agggaaagtgtacgccctgt

SEQ ID NO: 1569 - RNA, 20 nt, Homo sapiens
  source 1..20: mol_type = genomic RNA
gggaaagtgtacgccctgta

SEQ ID NO: 1570 - RNA, 20 nt, Homo sapiens
  source 1..20: mol_type = genomic RNA
ggaaagtgtacgccctgtat

SEQ ID NO: 1571 - RNA, 20 nt, Homo sapiens
  source 1..20: mol_type = genomic RNA
gaaagtgtacgccctgtata

SEQ ID NO: 1572 - RNA, 20 nt, Homo sapiens
  source 1..20: mol_type = genomic RNA
aaagtgtacgccctgtataa

SEQ ID NO: 1573 - RNA, 20 nt, Homo sapiens
  source 1..20: mol_type = genomic RNA
aagtgtacgccctgtataac

SEQ ID NO: 1574 - RNA, 20 nt, Homo sapiens
  source 1..20: mol_type = genomic RNA
agtgtacgccctgtataaca

SEQ ID NO: 1575 - RNA, 20 nt, Homo sapiens
  source 1..20: mol_type = genomic RNA
gtgtacgccctgtataacag

SEQ ID NO: 1576 - RNA, 20 nt, Homo sapiens
  source 1..20: mol_type = genomic RNA
tgtacgccctgtataacagt

SEQ ID NO: 1577 - RNA, 20 nt, Homo sapiens
  source 1..20: mol_type = genomic RNA
gtacgccctgtataacagtg

SEQ ID NO: 1578 - RNA, 20 nt, Homo sapiens
  source 1..20: mol_type = genomic RNA
tacgccctgtataacagtgt

SEQ ID NO: 1579 - RNA, 20 nt, Homo sapiens
  source 1..20: mol_type = genomic RNA
acgccctgtataacagtgtc

SEQ ID NO: 1580 - RNA, 20 nt, Homo sapiens
  source 1..20: mol_type = genomic RNA
cgccctgtataacagtgtcc

SEQ ID NO: 1581 - RNA, 20 nt, Homo sapiens
  source 1..20: mol_type = genomic RNA
gccctgtataacagtgtccg

SEQ ID NO: 1582 - RNA, 20 nt, Homo sapiens
  source 1..20: mol_type = genomic RNA
ccctgtataacagtgtccgc

SEQ ID NO: 1583 - RNA, 20 nt, Homo sapiens
  source 1..20: mol_type = genomic RNA
cctgtataacagtgtccgca

SEQ ID NO: 1584 - RNA, 20 nt, Homo sapiens
  source 1..20: mol_type = genomic RNA
ctgtataacagtgtccgcag

SEQ ID NO: 1585 - RNA, 20 nt, Homo sapiens
  source 1..20: mol_type = genomic RNA
tgtataacagtgtccgcaga

SEQ ID NO: 1586 - RNA, 20 nt, Homo sapiens
  source 1..20: mol_type = genomic RNA
gtataacagtgtccgcagaa

SEQ ID NO: 1587 - RNA, 20 nt, Homo sapiens
  source 1..20: mol_type = genomic RNA
tataacagtgtccgcagaag

SEQ ID NO: 1588 - RNA, 20 nt, Homo sapiens
  source 1..20: mol_type = genomic RNA
ataacagtgtccgcagaagc

SEQ ID NO: 1589 - RNA, 20 nt, Homo sapiens
  source 1..20: mol_type = genomic RNA
taacagtgtccgcagaagca

SEQ ID NO: 1590 - RNA, 20 nt, Homo sapiens
  source 1..20: mol_type = genomic RNA
aacagtgtccgcagaagcaa

SEQ ID NO: 1591 - RNA, 20 nt, Homo sapiens
  source 1..20: mol_type = genomic RNA
acagtgtccgcagaagcaag

SEQ ID NO: 1592 - RNA, 20 nt, Homo sapiens
  source 1..20: mol_type = genomic RNA
cagtgtccgcagaagcaagg

SEQ ID NO: 1593 - RNA, 20 nt, Homo sapiens
  source 1..20: mol_type = genomic RNA
agtgtccgcagaagcaaggg

SEQ ID NO: 1594 - RNA, 20 nt, Homo sapiens
  source 1..20: mol_type = genomic RNA
gtgtccgcagaagcaagggg

SEQ ID NO: 1595 - RNA, 20 nt, Homo sapiens
  source 1..20: mol_type = genomic RNA
tgtccgcagaagcaaggggc

SEQ ID NO: 1596 - RNA, 20 nt, Homo sapiens
  source 1..20: mol_type = genomic RNA
gtccgcagaagcaaggggct

SEQ ID NO: 1597 - RNA, 20 nt, Homo sapiens
  source 1..20: mol_type = genomic RNA
tccgcagaagcaaggggctg

SEQ ID NO: 1598 - RNA, 20 nt, Homo sapiens
  source 1..20: mol_type = genomic RNA
ccgcagaagcaaggggctga

SEQ ID NO: 1599 - RNA, 20 nt, Homo sapiens
  source 1..20: mol_type = genomic RNA
cgcagaagcaaggggctgaa

SEQ ID NO: 1600 - RNA, 20 nt, Homo sapiens
  source 1..20: mol_type = genomic RNA
gcagaagcaaggggctgaaa

SEQ ID NO: 1601 - RNA, 20 nt, Homo sapiens
  source 1..20: mol_type = genomic RNA
cagaagcaaggggctgaaaa

SEQ ID NO: 1602 - RNA, 20 nt, Homo sapiens
  source 1..20: mol_type = genomic RNA
agaagcaaggggctgaaaag

SEQ ID NO: 1603 - RNA, 20 nt, Homo sapiens
  source 1..20: mol_type = genomic RNA
gaagcaaggggctgaaaaga

SEQ ID NO: 1604 - RNA, 20 nt, Homo sapiens
  source 1..20: mol_type = genomic RNA
aagcaaggggctgaaaagat

SEQ ID NO: 1605 - RNA, 20 nt, Homo sapiens
  source 1..20: mol_type = genomic RNA
agcaaggggctgaaaagatc

SEQ ID NO: 1606 - RNA, 20 nt, Homo sapiens
  source 1..20: mol_type = genomic RNA
gcaaggggctgaaaagatct

SEQ ID NO: 1607 - RNA, 20 nt, Homo sapiens
  source 1..20: mol_type = genomic RNA
caaggggctgaaaagatctg

SEQ ID NO: 1608 - RNA, 20 nt, Homo sapiens
  source 1..20: mol_type = genomic RNA
aaggggctgaaaagatctga

SEQ ID NO: 1609 - RNA, 20 nt, Homo sapiens
  source 1..20: mol_type = genomic RNA
aggggctgaaaagatctgaa

SEQ ID NO: 1610 - RNA, 20 nt, Homo sapiens
  source 1..20: mol_type = genomic RNA
ggggctgaaaagatctgaag

SEQ ID NO: 1611 - RNA, 20 nt, Homo sapiens
  source 1..20: mol_type = genomic RNA
gggctgaaaagatctgaagg

SEQ ID NO: 1612 - RNA, 20 nt, Homo sapiens
  source 1..20: mol_type = genomic RNA
ggctgaaaagatctgaaggt

SEQ ID NO: 1613 - RNA, 20 nt, Homo sapiens
  source 1..20: mol_type = genomic RNA
gctgaaaagatctgaaggtc

SEQ ID NO: 1614 - RNA, 20 nt, Homo sapiens
  source 1..20: mol_type = genomic RNA
ctgaaaagatctgaaggtcc

SEQ ID NO: 1615 - RNA, 20 nt, Homo sapiens
  source 1..20: mol_type = genomic RNA
tgaaaagatctgaaggtccc

SEQ ID NO: 1616 - RNA, 20 nt, Homo sapiens
  source 1..20: mol_type = genomic RNA
gaaaagatctgaaggtccca

SEQ ID NO: 1617 - RNA, 20 nt, Homo sapiens
  source 1..20: mol_type = genomic RNA
aaaagatctgaaggtcccac

SEQ ID NO: 1618 - RNA, 20 nt, Homo sapiens
  source 1..20: mol_type = genomic RNA
aaagatctgaaggtcccacc

SEQ ID NO: 1619 - RNA, 20 nt, Homo sapiens
  source 1..20: mol_type = genomic RNA
aagatctgaaggtcccacct

SEQ ID NO: 1620 - RNA, 20 nt, Homo sapiens
  source 1..20: mol_type = genomic RNA
agatctgaaggtcccacctc

SEQ ID NO: 1621 - RNA, 20 nt, Homo sapiens
  source 1..20: mol_type = genomic RNA
gatctgaaggtcccacctcc

SEQ ID NO: 1622 - RNA, 20 nt, Homo sapiens
  source 1..20: mol_type = genomic RNA
atctgaaggtcccacctcca

SEQ ID NO: 1623 - RNA, 20 nt, Homo sapiens
  source 1..20: mol_type = genomic RNA
tctgaaggtcccacctccat

SEQ ID NO: 1624 - RNA, 20 nt, Homo sapiens
  source 1..20: mol_type = genomic RNA
ctgaaggtcccacctccatt

SEQ ID NO: 1625 - RNA, 20 nt, Homo sapiens
  source 1..20: mol_type = genomic RNA
tgaaggtcccacctccattt

SEQ ID NO: 1626 - RNA, 20 nt, Homo sapiens
  source 1..20: mol_type = genomic RNA
gaaggtcccacctccatttg

SEQ ID NO: 1627 - RNA, 20 nt, Homo sapiens
  source 1..20: mol_type = genomic RNA
aaggtcccacctccatttgc

SEQ ID NO: 1628 - RNA, 20 nt, Homo sapiens
  source 1..20: mol_type = genomic RNA
aggtcccacctccatttgca

SEQ ID NO: 1629 - RNA, 20 nt, Homo sapiens
  source 1..20: mol_type = genomic RNA
ggtcccacctccatttgcaa

SEQ ID NO: 1630 - RNA, 20 nt, Homo sapiens
  source 1..20: mol_type = genomic RNA
gtcccacctccatttgcaat

SEQ ID NO: 1631 - RNA, 20 nt, Homo sapiens
  source 1..20: mol_type = genomic RNA
tcccacctccatttgcaatt

SEQ ID NO: 1632 - RNA, 20 nt, Homo sapiens
  source 1..20: mol_type = genomic RNA
cccacctccatttgcaattg

SEQ ID NO: 1633 - RNA, 20 nt, Homo sapiens
  source 1..20: mol_type = genomic RNA
ccacctccatttgcaattga

SEQ ID NO: 1634 - RNA, 20 nt, Homo sapiens
  source 1..20: mol_type = genomic RNA
cacctccatttgcaattgac

SEQ ID NO: 1635 - RNA, 20 nt, Homo sapiens
  source 1..20: mol_type = genomic RNA
acctccatttgcaattgacc

SEQ ID NO: 1636 - RNA, 20 nt, Homo sapiens
  source 1..20: mol_type = genomic RNA
cctccatttgcaattgacct

SEQ ID NO: 1637 - RNA, 20 nt, Homo sapiens
  source 1..20: mol_type = genomic RNA
ctccatttgcaattgacctc

SEQ ID NO: 1638 - RNA, 20 nt, Homo sapiens
  source 1..20: mol_type = genomic RNA
tccatttgcaattgacctct

SEQ ID NO: 1639 - RNA, 20 nt, Homo sapiens
  source 1..20: mol_type = genomic RNA
ccatttgcaattgacctctt

SEQ ID NO: 1640 - RNA, 20 nt, Homo sapiens
  source 1..20: mol_type = genomic RNA
catttgcaattgacctcttc

SEQ ID NO: 1641 - RNA, 20 nt, Homo sapiens
  source 1..20: mol_type = genomic RNA
atttgcaattgacctcttct

SEQ ID NO: 1642 - RNA, 20 nt, Homo sapiens
  source 1..20: mol_type = genomic RNA
tttgcaattgacctcttctg

SEQ ID NO: 1643 - RNA, 20 nt, Homo sapiens
  source 1..20: mol_type = genomic RNA
ttgcaattgacctcttctgg

SEQ ID NO: 1644 - RNA, 20 nt, Homo sapiens
  source 1..20: mol_type = genomic RNA
tgcaattgacctcttctggg

SEQ ID NO: 1645 - RNA, 20 nt, Homo sapiens
  source 1..20: mol_type = genomic RNA
gcaattgacctcttctggga

SEQ ID NO: 1646 - RNA, 20 nt, Homo sapiens
  source 1..20: mol_type = genomic RNA
caattgacctcttctgggaa

SEQ ID NO: 1647 - RNA, 20 nt, Homo sapiens
  source 1..20: mol_type = genomic RNA
aattgacctcttctgggaac

SEQ ID NO: 1648 - RNA, 20 nt, Homo sapiens
  source 1..20: mol_type = genomic RNA
attgacctcttctgggaact

SEQ ID NO: 1649 - RNA, 20 nt, Homo sapiens
  source 1..20: mol_type = genomic RNA
ttgacctcttctgggaactt

SEQ ID NO: 1650 - RNA, 20 nt, Homo sapiens
  source 1..20: mol_type = genomic RNA
tgacctcttctgggaacttc

SEQ ID NO: 1651 - RNA, 20 nt, Homo sapiens
  source 1..20: mol_type = genomic RNA
gacctcttctgggaacttcc

SEQ ID NO: 1652 - RNA, 20 nt, Homo sapiens
  source 1..20: mol_type = genomic RNA
acctcttctgggaacttcct

SEQ ID NO: 1653 - RNA, 20 nt, Homo sapiens
  source 1..20: mol_type = genomic RNA
cctcttctgggaacttcctc

SEQ ID NO: 1654 - RNA, 20 nt, Homo sapiens
  source 1..20: mol_type = genomic RNA
ctcttctgggaacttcctca

SEQ ID NO: 1655 - RNA, 20 nt, Homo sapiens
  source 1..20: mol_type = genomic RNA
tcttctgggaacttcctcag

SEQ ID NO: 1656 - RNA, 20 nt, Homo sapiens
  source 1..20: mol_type = genomic RNA
cttctgggaacttcctcaga

SEQ ID NO: 1657 - RNA, 20 nt, Homo sapiens
  source 1..20: mol_type = genomic RNA
ttctgggaacttcctcagat

SEQ ID NO: 1658 - RNA, 20 nt, Homo sapiens
  source 1..20: mol_type = genomic RNA
tctgggaacttcctcagatg

SEQ ID NO: 1659 - RNA, 20 nt, Homo sapiens
  source 1..20: mol_type = genomic RNA
ctgggaacttcctcagatgg

SEQ ID NO: 1660 - RNA, 20 nt, Homo sapiens
  source 1..20: mol_type = genomic RNA
tgggaacttcctcagatgga

SEQ ID NO: 1661 - RNA, 20 nt, Homo sapiens
  source 1..20: mol_type = genomic RNA
gggaacttcctcagatggac

SEQ ID NO: 1662 - RNA, 20 nt, Homo sapiens
  source 1..20: mol_type = genomic RNA
ggaacttcctcagatggaca

SEQ ID NO: 1663 - RNA, 20 nt, Homo sapiens
  source 1..20: mol_type = genomic RNA
gaacttcctcagatggacaa

SEQ ID NO: 1664 - RNA, 20 nt, Homo sapiens
  source 1..20: mol_type = genomic RNA
aacttcctcagatggacaag

SEQ ID NO: 1665 - RNA, 20 nt, Homo sapiens
  source 1..20: mol_type = genomic RNA
acttcctcagatggacaaga

SEQ ID NO: 1666 - RNA, 20 nt, Homo sapiens
  source 1..20: mol_type = genomic RNA
cttcctcagatggacaagat

SEQ ID NO: 1667 - RNA, 20 nt, Homo sapiens
  source 1..20: mol_type = genomic RNA
ttcctcagatggacaagatt

SEQ ID NO: 1668 - RNA, 20 nt, Homo sapiens
  source 1..20: mol_type = genomic RNA
tcctcagatggacaagatta

SEQ ID NO: 1669 - RNA, 20 nt, Homo sapiens
  source 1..20: mol_type = genomic RNA
cctcagatggacaagattac

SEQ ID NO: 1670 - RNA, 20 nt, Homo sapiens
  source 1..20: mol_type = genomic RNA
ctcagatggacaagattacc

SEQ ID NO: 1671 - RNA, 20 nt, Homo sapiens
  source 1..20: mol_type = genomic RNA
tcagatggacaagattaccc

SEQ ID NO: 1672 - RNA, 20 nt, Homo sapiens
  source 1..20: mol_type = genomic RNA
cagatggacaagattacccc

SEQ ID NO: 1673 - RNA, 20 nt, Homo sapiens
  source 1..20: mol_type = genomic RNA
agatggacaagattacccca

SEQ ID NO: 1674 - RNA, 20 nt, Homo sapiens
  source 1..20: mol_type = genomic RNA
gatggacaagattaccccac

SEQ ID NO: 1675 - RNA, 20 nt, Homo sapiens
  source 1..20: mol_type = genomic RNA
atggacaagattaccccacc

SEQ ID NO: 1676 - RNA, 20 nt, Homo sapiens
  source 1..20: mol_type = genomic RNA
tggacaagattaccccacct

SEQ ID NO: 1677 - RNA, 20 nt, Homo sapiens
  source 1..20: mol_type = genomic RNA
ggacaagattaccccacctt

SEQ ID NO: 1678 - RNA, 20 nt, Homo sapiens
  source 1..20: mol_type = genomic RNA
gacaagattaccccaccttg

SEQ ID NO: 1679 - RNA, 20 nt, Homo sapiens
  source 1..20: mol_type = genomic RNA
acaagattaccccaccttgc

SEQ ID NO: 1680 - RNA, 20 nt, Homo sapiens
  source 1..20: mol_type = genomic RNA
caagattaccccaccttgcc

SEQ ID NO: 1681 - RNA, 20 nt, Homo sapiens
  source 1..20: mol_type = genomic RNA
aagattaccccaccttgccc

SEQ ID NO: 1682 - RNA, 20 nt, Homo sapiens
  source 1..20: mol_type = genomic RNA
agattaccccaccttgccct

SEQ ID NO: 1683 - RNA, 20 nt, Homo sapiens
  source 1..20: mol_type = genomic RNA
gattaccccaccttgccctt

SEQ ID NO: 1684 - RNA, 20 nt, Homo sapiens
  source 1..20: mol_type = genomic RNA
attaccccaccttgcccttt

SEQ ID NO: 1685 - RNA, 20 nt, Homo sapiens
  source 1..20: mol_type = genomic RNA
ttaccccaccttgcccttta

SEQ ID NO: 1686 - RNA, 20 nt, Homo sapiens
  source 1..20: mol_type = genomic RNA
taccccaccttgccctttac

SEQ ID NO: 1687 - RNA, 20 nt, Homo sapiens
  source 1..20: mol_type = genomic RNA
accccaccttgccctttacg

SEQ ID NO: 1688 - RNA, 20 nt, Homo sapiens
  source 1..20: mol_type = genomic RNA
ccccaccttgccctttacgt

SEQ ID NO: 1689 - RNA, 20 nt, Homo sapiens
  source 1..20: mol_type = genomic RNA
cccaccttgccctttacgta

SEQ ID NO: 1690 - RNA, 20 nt, Homo sapiens
  source 1..20: mol_type = genomic RNA
ccaccttgccctttacgtat

SEQ ID NO: 1691 - RNA, 20 nt, Homo sapiens
  source 1..20: mol_type = genomic RNA
caccttgccctttacgtatc

SEQ ID NO: 1692 - RNA, 20 nt, Homo sapiens
  source 1..20: mol_type = genomic RNA
accttgccctttacgtatct

SEQ ID NO: 1693 - RNA, 20 nt, Homo sapiens
  source 1..20: mol_type = genomic RNA
ccttgccctttacgtatctg

SEQ ID NO: 1694 - RNA, 20 nt, Homo sapiens
  source 1..20: mol_type = genomic RNA
cttgccctttacgtatctgc

SEQ ID NO: 1695 - RNA, 20 nt, Homo sapiens
  source 1..20: mol_type = genomic RNA
ttgccctttacgtatctgct

SEQ ID NO: 1696 - RNA, 20 nt, Homo sapiens
  source 1..20: mol_type = genomic RNA
tgccctttacgtatctgctc

SEQ ID NO: 1697 - RNA, 20 nt, Homo sapiens
  source 1..20: mol_type = genomic RNA
gccctttacgtatctgctct

SEQ ID NO: 1698 - RNA, 20 nt, Homo sapiens
  source 1..20: mol_type = genomic RNA
ccctttacgtatctgctctt

SEQ ID NO: 1699 - RNA, 20 nt, Homo sapiens
  source 1..20: mol_type = genomic RNA
cctttacgtatctgctctta

SEQ ID NO: 1700 - RNA, 20 nt, Homo sapiens
  source 1..20: mol_type = genomic RNA
ctttacgtatctgctcttag

SEQ ID NO: 1701 - RNA, 20 nt, Homo sapiens
  source 1..20: mol_type = genomic RNA
tttacgtatctgctcttagg

SEQ ID NO: 1702 - RNA, 20 nt, Homo sapiens
  source 1..20: mol_type = genomic RNA
ttacgtatctgctcttaggt

SEQ ID NO: 1703 - RNA, 20 nt, Homo sapiens
  source 1..20: mol_type = genomic RNA
tacgtatctgctcttaggtg

SEQ ID NO: 1704 - RNA, 20 nt, Homo sapiens
  source 1..20: mol_type = genomic RNA
acgtatctgctcttaggtgc

SEQ ID NO: 1705 - RNA, 20 nt, Homo sapiens
  source 1..20: mol_type = genomic RNA
cgtatctgctcttaggtgct

SEQ ID NO: 1706 - RNA, 20 nt, Homo sapiens
  source 1..20: mol_type = genomic RNA
gtatctgctcttaggtgctt

SEQ ID NO: 1707 - RNA, 20 nt, Homo sapiens
  source 1..20: mol_type = genomic RNA
tatctgctcttaggtgcttc

SEQ ID NO: 1708 - RNA, 20 nt, Homo sapiens
  source 1..20: mol_type = genomic RNA
atctgctcttaggtgcttct

SEQ ID NO: 1709 - RNA, 20 nt, Homo sapiens
  source 1..20: mol_type = genomic RNA
tctgctcttaggtgcttctt

SEQ ID NO: 1710 - RNA, 20 nt, Homo sapiens
  source 1..20: mol_type = genomic RNA
ctgctcttaggtgcttcttc

SEQ ID NO: 1711 - RNA, 20 nt, Homo sapiens
  source 1..20: mol_type = genomic RNA
tgctcttaggtgcttcttca

SEQ ID NO: 1712 - RNA, 20 nt, Homo sapiens
  source 1..20: mol_type = genomic RNA
gctcttaggtgcttcttcac

SEQ ID NO: 1713 - RNA, 20 nt, Homo sapiens
  source 1..20: mol_type = genomic RNA
ctcttaggtgcttcttcact

SEQ ID NO: 1714 - RNA, 20 nt, Homo sapiens
  source 1..20: mol_type = genomic RNA
tcttaggtgcttcttcactt

SEQ ID NO: 1715 - RNA, 20 nt, Homo sapiens
  source 1..20: mol_type = genomic RNA
cttaggtgcttcttcacttc

SEQ ID NO: 1716 - RNA, 20 nt, Homo sapiens
  source 1..20: mol_type = genomic RNA
ttaggtgcttcttcacttca

SEQ ID NO: 1717 - RNA, 20 nt, Homo sapiens
  source 1..20: mol_type = genomic RNA
taggtgcttcttcacttcag

SEQ ID NO: 1718 - RNA, 20 nt, Homo sapiens
  source 1..20: mol_type = genomic RNA
aggtgcttcttcacttcagt

SEQ ID NO: 1719 - RNA, 20 nt, Homo sapiens
  source 1..20: mol_type = genomic RNA
ggtgcttcttcacttcagtt

SEQ ID NO: 1720 - RNA, 20 nt, Homo sapiens
  source 1..20: mol_type = genomic RNA
gtgcttcttcacttcagttg

SEQ ID NO: 1721 - RNA, 20 nt, Homo sapiens
  source 1..20: mol_type = genomic RNA
tgcttcttcacttcagttgc

SEQ ID NO: 1722 - RNA, 20 nt, Homo sapiens
  source 1..20: mol_type = genomic RNA
gcttcttcacttcagttgct

SEQ ID NO: 1723 - RNA, 20 nt, Homo sapiens
  source 1..20: mol_type = genomic RNA
cttcttcacttcagttgctt

SEQ ID NO: 1724 - RNA, 20 nt, Homo sapiens
  source 1..20: mol_type = genomic RNA
ttcttcacttcagttgcttt

SEQ ID NO: 1725 - RNA, 20 nt, Homo sapiens
  source 1..20: mol_type = genomic RNA
tcttcacttcagttgctttg

SEQ ID NO: 1726 - RNA, 20 nt, Homo sapiens
  source 1..20: mol_type = genomic RNA
cttcacttcagttgctttgc

SEQ ID NO: 1727 - RNA, 20 nt, Homo sapiens
  source 1..20: mol_type = genomic RNA
ttcacttcagttgctttgca

SEQ ID NO: 1728 - RNA, 20 nt, Homo sapiens
  source 1..20: mol_type = genomic RNA
tcacttcagttgctttgcag

SEQ ID NO: 1729 - RNA, 20 nt, Homo sapiens
  source 1..20: mol_type = genomic RNA
cacttcagttgctttgcagg

SEQ ID NO: 1730 - RNA, 20 nt, Homo sapiens
  source 1..20: mol_type = genomic RNA
acttcagttgctttgcagga

SEQ ID NO: 1731 - RNA, 20 nt, Homo sapiens
  source 1..20: mol_type = genomic RNA
cttcagttgctttgcaggaa

SEQ ID NO: 1732 - RNA, 20 nt, Homo sapiens
  source 1..20: mol_type = genomic RNA
ttcagttgctttgcaggaag

SEQ ID NO: 1733 - RNA, 20 nt, Homo sapiens
  source 1..20: mol_type = genomic RNA
tcagttgctttgcaggaagt

SEQ ID NO: 1734 - RNA, 20 nt, Homo sapiens
  source 1..20: mol_type = genomic RNA
cagttgctttgcaggaagtg

SEQ ID NO: 1735 - RNA, 20 nt, Homo sapiens
  source 1..20: mol_type = genomic RNA
agttgctttgcaggaagtgt

SEQ ID NO: 1736 - RNA, 20 nt, Homo sapiens
  source 1..20: mol_type = genomic RNA
gttgctttgcaggaagtgtc

SEQ ID NO: 1737 - RNA, 20 nt, Homo sapiens
  source 1..20: mol_type = genomic RNA
ttgctttgcaggaagtgtct

SEQ ID NO: 1738 - RNA, 20 nt, Homo sapiens
  source 1..20: mol_type = genomic RNA
tgctttgcaggaagtgtcta

SEQ ID NO: 1739 - RNA, 20 nt, Homo sapiens
  source 1..20: mol_type = genomic RNA
gctttgcaggaagtgtctag

SEQ ID NO: 1740 - RNA, 20 nt, Homo sapiens
  source 1..20: mol_type = genomic RNA
ctttgcaggaagtgtctaga

SEQ ID NO: 1741 - RNA, 20 nt, Homo sapiens
  source 1..20: mol_type = genomic RNA
tttgcaggaagtgtctagag

SEQ ID NO: 1742 - RNA, 20 nt, Homo sapiens
  source 1..20: mol_type = genomic RNA
ttgcaggaagtgtctagagg

SEQ ID NO: 1743 - RNA, 20 nt, Homo sapiens
  source 1..20: mol_type = genomic RNA
tgcaggaagtgtctagagga

SEQ ID NO: 1744 - RNA, 20 nt, Homo sapiens
  source 1..20: mol_type = genomic RNA
gcaggaagtgtctagaggaa

SEQ ID NO: 1745 - RNA, 20 nt, Homo sapiens
  source 1..20: mol_type = genomic RNA
caggaagtgtctagaggaat

SEQ ID NO: 1746 - RNA, 20 nt, Homo sapiens
  source 1..20: mol_type = genomic RNA
aggaagtgtctagaggaata

SEQ ID NO: 1747 - RNA, 20 nt, Homo sapiens
  source 1..20: mol_type = genomic RNA
ggaagtgtctagaggaatat

SEQ ID NO: 1748 - RNA, 20 nt, Homo sapiens
  source 1..20: mol_type = genomic RNA
gaagtgtctagaggaatatg

SEQ ID NO: 1749 - RNA, 20 nt, Homo sapiens
  source 1..20: mol_type = genomic RNA
aagtgtctagaggaatatgg

SEQ ID NO: 1750 - RNA, 20 nt, Homo sapiens
  source 1..20: mol_type = genomic RNA
agtgtctagaggaatatggt

SEQ ID NO: 1751 - RNA, 20 nt, Homo sapiens
  source 1..20: mol_type = genomic RNA
gtgtctagaggaatatggtg

SEQ ID NO: 1752 - RNA, 20 nt, Homo sapiens
  source 1..20: mol_type = genomic RNA
tgtctagaggaatatggtgg

SEQ ID NO: 1753 - RNA, 20 nt, Homo sapiens
  source 1..20: mol_type = genomic RNA
gtctagaggaatatggtggg

SEQ ID NO: 1754 - RNA, 20 nt, Homo sapiens
  source 1..20: mol_type = genomic RNA
tctagaggaatatggtgggc

SEQ ID NO: 1755 - RNA, 20 nt, Homo sapiens
  source 1..20: mol_type = genomic RNA
ctagaggaatatggtgggca

SEQ ID NO: 1756 - RNA, 20 nt, Homo sapiens
  source 1..20: mol_type = genomic RNA
tagaggaatatggtgggcac

SEQ ID NO: 1757 - RNA, 20 nt, Homo sapiens
  source 1..20: mol_type = genomic RNA
agaggaatatggtgggcaca

SEQ ID NO: 1758 - RNA, 20 nt, Homo sapiens
  source 1..20: mol_type = genomic RNA
gaggaatatggtgggcacag

SEQ ID NO: 1759 - RNA, 20 nt, Homo sapiens
  source 1..20: mol_type = genomic RNA
aggaatatggtgggcacaga

SEQ ID NO: 1760 - RNA, 20 nt, Homo sapiens
  source 1..20: mol_type = genomic RNA
ggaatatggtgggcacagaa

SEQ ID NO: 1761 - RNA, 20 nt, Homo sapiens
  source 1..20: mol_type = genomic RNA
gaatatggtgggcacagaag

SEQ ID NO: 1762 - RNA, 20 nt, Homo sapiens
  source 1..20: mol_type = genomic RNA
aatatggtgggcacagaagt

SEQ ID NO: 1763 - RNA, 20 nt, Homo sapiens
  source 1..20: mol_type = genomic RNA
atatggtgggcacagaagta

SEQ ID NO: 1764 - RNA, 20 nt, Homo sapiens
  source 1..20: mol_type = genomic RNA
tatggtgggcacagaagtag

SEQ ID NO: 1765 - RNA, 20 nt, Homo sapiens
  source 1..20: mol_type = genomic RNA
atggtgggcacagaagtagc

SEQ ID NO: 1766 - RNA, 20 nt, Homo sapiens
  source 1..20: mol_type = genomic RNA
tggtgggcacagaagtagct

SEQ ID NO: 1767 - RNA, 20 nt, Homo sapiens
  source 1..20: mol_type = genomic RNA
ggtgggcacagaagtagctc

SEQ ID NO: 1768 - RNA, 20 nt, Homo sapiens
  source 1..20: mol_type = genomic RNA
gtgggcacagaagtagctct

SEQ ID NO: 1769 - RNA, 20 nt, Homo sapiens
  source 1..20: mol_type = genomic RNA
tgggcacagaagtagctctg

SEQ ID NO: 1770 - RNA, 20 nt, Homo sapiens
  source 1..20: mol_type = genomic RNA
gggcacagaagtagctctgg

SEQ ID NO: 1771 - RNA, 20 nt, Homo sapiens
  source 1..20: mol_type = genomic RNA
ggcacagaagtagctctggt

SEQ ID NO: 1772 - RNA, 20 nt, Homo sapiens
  source 1..20: mol_type = genomic RNA
gcacagaagtagctctggtg

SEQ ID NO: 1773 - RNA, 20 nt, Homo sapiens
  source 1..20: mol_type = genomic RNA
cacagaagtagctctggtga

SEQ ID NO: 1774 - RNA, 20 nt, Homo sapiens
  source 1..20: mol_type = genomic RNA
acagaagtagctctggtgac

SEQ ID NO: 1775 - RNA, 20 nt, Homo sapiens
  source 1..20: mol_type = genomic RNA
cagaagtagctctggtgacc

SEQ ID NO: 1776 - RNA, 20 nt, Homo sapiens
  source 1..20: mol_type = genomic RNA
agaagtagctctggtgacct

SEQ ID NO: 1777 - RNA, 20 nt, Homo sapiens
  source 1..20: mol_type = genomic RNA
gaagtagctctggtgacctt

SEQ ID NO: 1778 - RNA, 20 nt, Homo sapiens
  source 1..20: mol_type = genomic RNA
aagtagctctggtgaccttg

SEQ ID NO: 1779 - RNA, 20 nt, Homo sapiens
  source 1..20: mol_type = genomic RNA
agtagctctggtgaccttga

SEQ ID NO: 1780 - RNA, 20 nt, Homo sapiens
  source 1..20: mol_type = genomic RNA
gtagctctggtgaccttgat

SEQ ID NO: 1781 - RNA, 20 nt, Homo sapiens
  source 1..20: mol_type = genomic RNA
tagctctggtgaccttgatc

SEQ ID NO: 1782 - RNA, 20 nt, Homo sapiens
  source 1..20: mol_type = genomic RNA
agctctggtgaccttgatca

SEQ ID NO: 1783 - RNA, 20 nt, Homo sapiens
  source 1..20: mol_type = genomic RNA
gctctggtgaccttgatcaa

SEQ ID NO: 1784 - RNA, 20 nt, Homo sapiens
  source 1..20: mol_type = genomic RNA
ctctggtgaccttgatcaag

SEQ ID NO: 1785 - RNA, 20 nt, Homo sapiens
  source 1..20: mol_type = genomic RNA
tctggtgaccttgatcaagg

SEQ ID NO: 1786 - RNA, 20 nt, Homo sapiens
  source 1..20: mol_type = genomic RNA
ctggtgaccttgatcaaggt

SEQ ID NO: 1787 - RNA, 20 nt, Homo sapiens
  source 1..20: mol_type = genomic RNA
tggtgaccttgatcaaggtg

SEQ ID NO: 1788 - RNA, 20 nt, Homo sapiens
  source 1..20: mol_type = genomic RNA
ggtgaccttgatcaaggtgt

SEQ ID NO: 1789 - RNA, 20 nt, Homo sapiens
  source 1..20: mol_type = genomic RNA
gtgaccttgatcaaggtgtt

SEQ ID NO: 1790 - RNA, 20 nt, Homo sapiens
  source 1..20: mol_type = genomic RNA
tgaccttgatcaaggtgttt

SEQ ID NO: 1791 - RNA, 20 nt, Homo sapiens
  source 1..20: mol_type = genomic RNA
gaccttgatcaaggtgtttt

SEQ ID NO: 1792 - RNA, 20 nt, Homo sapiens
  source 1..20: mol_type = genomic RNA
accttgatcaaggtgttttg

SEQ ID NO: 1793 - RNA, 20 nt, Homo sapiens
  source 1..20: mol_type = genomic RNA
ccttgatcaaggtgttttga

SEQ ID NO: 1794 - RNA, 20 nt, Homo sapiens
  source 1..20: mol_type = genomic RNA
cttgatcaaggtgttttgaa

SEQ ID NO: 1795 - RNA, 20 nt, Homo sapiens
  source 1..20: mol_type = genomic RNA
ttgatcaaggtgttttgaaa

SEQ ID NO: 1796 - RNA, 20 nt, Homo sapiens
  source 1..20: mol_type = genomic RNA
tgatcaaggtgttttgaaat

SEQ ID NO: 1797 - RNA, 20 nt, Homo sapiens
  source 1..20: mol_type = genomic RNA
gatcaaggtgttttgaaatg

SEQ ID NO: 1798 - RNA, 20 nt, Homo sapiens
  source 1..20: mol_type = genomic RNA
atcaaggtgttttgaaatgc

SEQ ID NO: 1799 - RNA, 20 nt, Homo sapiens
  source 1..20: mol_type = genomic RNA
tcaaggtgttttgaaatgca

SEQ ID NO: 1800 - RNA, 20 nt, Homo sapiens
  source 1..20: mol_type = genomic RNA
caaggtgttttgaaatgcag

SEQ ID NO: 1801 - RNA, 20 nt, Homo sapiens
  source 1..20: mol_type = genomic RNA
aaggtgttttgaaatgcaga

SEQ ID NO: 1802 - RNA, 20 nt, Homo sapiens
  source 1..20: mol_type = genomic RNA
aggtgttttgaaatgcagaa

SEQ ID NO: 1803 - RNA, 20 nt, Homo sapiens
  source 1..20: mol_type = genomic RNA
ggtgttttgaaatgcagaat

SEQ ID NO: 1804 - RNA, 20 nt, Homo sapiens
  source 1..20: mol_type = genomic RNA
gtgttttgaaatgcagaatt

SEQ ID NO: 1805 - RNA, 20 nt, Homo sapiens
  source 1..20: mol_type = genomic RNA
tgttttgaaatgcagaattc

SEQ ID NO: 1806 - RNA, 20 nt, Homo sapiens
  source 1..20: mol_type = genomic RNA
gttttgaaatgcagaattct

SEQ ID NO: 1807 - RNA, 20 nt, Homo sapiens
  source 1..20: mol_type = genomic RNA
ttttgaaatgcagaattctt

SEQ ID NO: 1808 - RNA, 20 nt, Homo sapiens
  source 1..20: mol_type = genomic RNA
tttgaaatgcagaattcttg

SEQ ID NO: 1809 - RNA, 20 nt, Homo sapiens
  source 1..20: mol_type = genomic RNA
ttgaaatgcagaattcttga

SEQ ID NO: 1810 - RNA, 20 nt, Homo sapiens
  source 1..20: mol_type = genomic RNA
tgaaatgcagaattcttgag

SEQ ID NO: 1811 - RNA, 20 nt, Homo sapiens
  source 1..20: mol_type = genomic RNA
gaaatgcagaattcttgagt

SEQ ID NO: 1812 - RNA, 20 nt, Homo sapiens
  source 1..20: mol_type = genomic RNA
aaatgcagaattcttgagtt

SEQ ID NO: 1813 - RNA, 20 nt, Homo sapiens
  source 1..20: mol_type = genomic RNA
aatgcagaattcttgagttc

SEQ ID NO: 1814 - RNA, 20 nt, Homo sapiens
  source 1..20: mol_type = genomic RNA
atgcagaattcttgagttct

SEQ ID NO: 1815 - RNA, 20 nt, Homo sapiens
  source 1..20: mol_type = genomic RNA
tgcagaattcttgagttctg

SEQ ID NO: 1816 - RNA, 20 nt, Homo sapiens
  source 1..20: mol_type = genomic RNA
gcagaattcttgagttctgg

SEQ ID NO: 1817 - RNA, 20 nt, Homo sapiens
  source 1..20: mol_type = genomic RNA
cagaattcttgagttctgga

SEQ ID NO: 1818 - RNA, 20 nt, Homo sapiens
  source 1..20: mol_type = genomic RNA
agaattcttgagttctggaa

SEQ ID NO: 1819 - RNA, 20 nt, Homo sapiens
  source 1..20: mol_type = genomic RNA
gaattcttgagttctggaag

SEQ ID NO: 1820 - RNA, 20 nt, Homo sapiens
  source 1..20: mol_type = genomic RNA
aattcttgagttctggaagg

SEQ ID NO: 1821 - RNA, 20 nt, Homo sapiens
  source 1..20: mol_type = genomic RNA
attcttgagttctggaaggg

SEQ ID NO: 1822 - RNA, 20 nt, Homo sapiens
  source 1..20: mol_type = genomic RNA
ttcttgagttctggaaggga

SEQ ID NO: 1823 - RNA, 20 nt, Homo sapiens
  source 1..20: mol_type = genomic RNA
tcttgagttctggaagggac

SEQ ID NO: 1824 - RNA, 20 nt, Homo sapiens
  source 1..20: mol_type = genomic RNA
cttgagttctggaagggact

SEQ ID NO: 1825 - RNA, 20 nt, Homo sapiens
  source 1..20: mol_type = genomic RNA
ttgagttctggaagggactt

SEQ ID NO: 1826 - RNA, 20 nt, Homo sapiens
  source 1..20: mol_type = genomic RNA
tgagttctggaagggacttt

SEQ ID NO: 1827 - RNA, 20 nt, Homo sapiens
  source 1..20: mol_type = genomic RNA
gagttctggaagggacttta

SEQ ID NO: 1828 - RNA, 20 nt, Homo sapiens
  source 1..20: mol_type = genomic RNA
agttctggaagggactttag

SEQ ID NO: 1829 - RNA, 20 nt, Homo sapiens
  source 1..20: mol_type = genomic RNA
gttctggaagggactttaga

SEQ ID NO: 1830 - RNA, 20 nt, Homo sapiens
  source 1..20: mol_type = genomic RNA
ttctggaagggactttagag

SEQ ID NO: 1831 - RNA, 20 nt, Homo sapiens
  source 1..20: mol_type = genomic RNA
tctggaagggactttagaga

SEQ ID NO: 1832 - RNA, 20 nt, Homo sapiens
  source 1..20: mol_type = genomic RNA
ctggaagggactttagagaa

SEQ ID NO: 1833 - RNA, 20 nt, Homo sapiens
  source 1..20: mol_type = genomic RNA
tggaagggactttagagaat

SEQ ID NO: 1834 - RNA, 20 nt, Homo sapiens
  source 1..20: mol_type = genomic RNA
ggaagggactttagagaata

SEQ ID NO: 1835 - RNA, 20 nt, Homo sapiens
  source 1..20: mol_type = genomic RNA
gaagggactttagagaatac

SEQ ID NO: 1836 - RNA, 20 nt, Homo sapiens
  source 1..20: mol_type = genomic RNA
aagggactttagagaatacc

SEQ ID NO: 1837 - RNA, 20 nt, Homo sapiens
  source 1..20: mol_type = genomic RNA
agggactttagagaatacca

SEQ ID NO: 1838 - RNA, 20 nt, Homo sapiens
  source 1..20: mol_type = genomic RNA
gggactttagagaataccag

SEQ ID NO: 1839 - RNA, 20 nt, Homo sapiens
  source 1..20: mol_type = genomic RNA
ggactttagagaataccagt

SEQ ID NO: 1840 - RNA, 20 nt, Homo sapiens
  source 1..20: mol_type = genomic RNA
gactttagagaataccagtg

SEQ ID NO: 1841 - RNA, 20 nt, Homo sapiens
  source 1..20: mol_type = genomic RNA
actttagagaataccagtgt

SEQ ID NO: 1842 - RNA, 20 nt, Homo sapiens
  source 1..20: mol_type = genomic RNA
ctttagagaataccagtgtt

SEQ ID NO: 1843 - RNA, 20 nt, Homo sapiens
  source 1..20: mol_type = genomic RNA
tttagagaataccagtgtta

SEQ ID NO: 1844 - RNA, 20 nt, Homo sapiens
  source 1..20: mol_type = genomic RNA
ttagagaataccagtgttat

SEQ ID NO: 1845 - RNA, 20 nt, Homo sapiens
  source 1..20: mol_type = genomic RNA
tagagaataccagtgttatt

SEQ ID NO: 1846 - RNA, 20 nt, Homo sapiens
  source 1..20: mol_type = genomic RNA
agagaataccagtgttatta

SEQ ID NO: 1847 - RNA, 20 nt, Homo sapiens
  source 1..20: mol_type = genomic RNA
gagaataccagtgttattaa

SEQ ID NO: 1848 - RNA, 20 nt, Homo sapiens
  source 1..20: mol_type = genomic RNA
agaataccagtgttattaat

SEQ ID NO: 1849 - RNA, 20 nt, Homo sapiens
  source 1..20: mol_type = genomic RNA
gaataccagtgttattaatg

SEQ ID NO: 1850 - RNA, 20 nt, Homo sapiens
  source 1..20: mol_type = genomic RNA
aataccagtgttattaatga

SEQ ID NO: 1851 - RNA, 20 nt, Homo sapiens
  source 1..20: mol_type = genomic RNA
ataccagtgttattaatgac

SEQ ID NO: 1852 - RNA, 20 nt, Homo sapiens
  source 1..20: mol_type = genomic RNA
taccagtgttattaatgaca

SEQ ID NO: 1853 - RNA, 20 nt, Homo sapiens
  source 1..20: mol_type = genomic RNA
accagtgttattaatgacaa

SEQ ID NO: 1854 - RNA, 20 nt, Homo sapiens
  source 1..20: mol_type = genomic RNA
ccagtgttattaatgacaaa

SEQ ID NO: 1855 - RNA, 20 nt, Homo sapiens
  source 1..20: mol_type = genomic RNA
cagtgttattaatgacaaag

SEQ ID NO: 1856 - RNA, 20 nt, Homo sapiens
  source 1..20: mol_type = genomic RNA
agtgttattaatgacaaagg

SEQ ID NO: 1857 - RNA, 20 nt, Homo sapiens
  source 1..20: mol_type = genomic RNA
gtgttattaatgacaaaggc

SEQ ID NO: 1858 - RNA, 20 nt, Homo sapiens
  source 1..20: mol_type = genomic RNA
tgttattaatgacaaaggca

SEQ ID NO: 1859 - RNA, 20 nt, Homo sapiens
  source 1..20: mol_type = genomic RNA
gttattaatgacaaaggcac

SEQ ID NO: 1860 - RNA, 20 nt, Homo sapiens
  source 1..20: mol_type = genomic RNA
ttattaatgacaaaggcact

SEQ ID NO: 1861 - RNA, 20 nt, Homo sapiens
  source 1..20: mol_type = genomic RNA
tattaatgacaaaggcactg

SEQ ID NO: 1862 - RNA, 20 nt, Homo sapiens
  source 1..20: mol_type = genomic RNA
attaatgacaaaggcactga

SEQ ID NO: 1863 - RNA, 20 nt, Homo sapiens
  source 1..20: mol_type = genomic RNA
ttaatgacaaaggcactgag

SEQ ID NO: 1864 - RNA, 20 nt, Homo sapiens
  source 1..20: mol_type = genomic RNA
taatgacaaaggcactgagg

SEQ ID NO: 1865 - RNA, 20 nt, Homo sapiens
  source 1..20: mol_type = genomic RNA
aatgacaaaggcactgaggc

SEQ ID NO: 1866 - RNA, 20 nt, Homo sapiens
  source 1..20: mol_type = genomic RNA
atgacaaaggcactgaggcc

SEQ ID NO: 1867 - RNA, 20 nt, Homo sapiens
  source 1..20: mol_type = genomic RNA
tgacaaaggcactgaggccc

SEQ ID NO: 1868 - RNA, 20 nt, Homo sapiens
  source 1..20: mol_type = genomic RNA
gacaaaggcactgaggccca

SEQ ID NO: 1869 - RNA, 20 nt, Homo sapiens
  source 1..20: mol_type = genomic RNA
acaaaggcactgaggcccag

SEQ ID NO: 1870 - RNA, 20 nt, Homo sapiens
  source 1..20: mol_type = genomic RNA
caaaggcactgaggcccagg

SEQ ID NO: 1871 - RNA, 20 nt, Homo sapiens
  source 1..20: mol_type = genomic RNA
aaaggcactgaggcccaggg

SEQ ID NO: 1872 - RNA, 20 nt, Homo sapiens
  source 1..20: mol_type = genomic RNA
aaggcactgaggcccaggga

SEQ ID NO: 1873 - RNA, 20 nt, Homo sapiens
  source 1..20: mol_type = genomic RNA
aggcactgaggcccagggag

SEQ ID NO: 1874 - RNA, 20 nt, Homo sapiens
  source 1..20: mol_type = genomic RNA
ggcactgaggcccagggagg

SEQ ID NO: 1875 - RNA, 20 nt, Homo sapiens
  source 1..20: mol_type = genomic RNA
gcactgaggcccagggaggt

SEQ ID NO: 1876 - RNA, 20 nt, Homo sapiens
  source 1..20: mol_type = genomic RNA
cactgaggcccagggaggtg

SEQ ID NO: 1877 - RNA, 20 nt, Homo sapiens
  source 1..20: mol_type = genomic RNA
actgaggcccagggaggtga

SEQ ID NO: 1878 - RNA, 20 nt, Homo sapiens
  source 1..20: mol_type = genomic RNA
ctgaggcccagggaggtgac

SEQ ID NO: 1879 - RNA, 20 nt, Homo sapiens
  source 1..20: mol_type = genomic RNA
tgaggcccagggaggtgacc

SEQ ID NO: 1880 - RNA, 20 nt, Homo sapiens
  source 1..20: mol_type = genomic RNA
gaggcccagggaggtgaccc

SEQ ID NO: 1881 - RNA, 20 nt, Homo sapiens
  source 1..20: mol_type = genomic RNA
aggcccagggaggtgacccg

SEQ ID NO: 1882 - RNA, 20 nt, Homo sapiens
  source 1..20: mol_type = genomic RNA
ggcccagggaggtgacccga

SEQ ID NO: 1883 - RNA, 20 nt, Homo sapiens
  source 1..20: mol_type = genomic RNA
gcccagggaggtgacccgaa

SEQ ID NO: 1884 - RNA, 20 nt, Homo sapiens
  source 1..20: mol_type = genomic RNA
cccagggaggtgacccgaat

SEQ ID NO: 1885 - RNA, 20 nt, Homo sapiens
  source 1..20: mol_type = genomic RNA
ccagggaggtgacccgaatt

SEQ ID NO: 1886 - RNA, 20 nt, Homo sapiens
  source 1..20: mol_type = genomic RNA
cagggaggtgacccgaatta

SEQ ID NO: 1887 - RNA, 20 nt, Homo sapiens
  source 1..20: mol_type = genomic RNA
agggaggtgacccgaattat

SEQ ID NO: 1888 - RNA, 20 nt, Homo sapiens
  source 1..20: mol_type = genomic RNA
gggaggtgacccgaattata

SEQ ID NO: 1889 - RNA, 20 nt, Homo sapiens
  source 1..20: mol_type = genomic RNA
ggaggtgacccgaattataa

SEQ ID NO: 1890 - RNA, 20 nt, Homo sapiens
  source 1..20: mol_type = genomic RNA
gaggtgacccgaattataaa

SEQ ID NO: 1891 - RNA, 20 nt, Homo sapiens
  source 1..20: mol_type = genomic RNA
aggtgacccgaattataaag

SEQ ID NO: 1892 - RNA, 20 nt, Homo sapiens
  source 1..20: mol_type = genomic RNA
ggtgacccgaattataaagg

SEQ ID NO: 1893 - RNA, 20 nt, Homo sapiens
  source 1..20: mol_type = genomic RNA
gtgacccgaattataaaggc

SEQ ID NO: 1894 - RNA, 20 nt, Homo sapiens
  source 1..20: mol_type = genomic RNA
tgacccgaattataaaggcc

SEQ ID NO: 1895 - RNA, 20 nt, Homo sapiens
  source 1..20: mol_type = genomic RNA
gacccgaattataaaggcca

SEQ ID NO: 1896 - RNA, 20 nt, Homo sapiens
  source 1..20: mol_type = genomic RNA
acccgaattataaaggccag

SEQ ID NO: 1897 - RNA, 20 nt, Homo sapiens
  source 1..20: mol_type = genomic RNA
cccgaattataaaggccagc

SEQ ID NO: 1898 - RNA, 20 nt, Homo sapiens
  source 1..20: mol_type = genomic RNA
ccgaattataaaggccagcg

SEQ ID NO: 1899 - RNA, 20 nt, Homo sapiens
  source 1..20: mol_type = genomic RNA
cgaattataaaggccagcgc

SEQ ID NO: 1900 - RNA, 20 nt, Homo sapiens
  source 1..20: mol_type = genomic RNA
gaattataaaggccagcgcc

SEQ ID NO: 1901 - RNA, 20 nt, Homo sapiens
  source 1..20: mol_type = genomic RNA
aattataaaggccagcgcca

SEQ ID NO: 1902 - RNA, 20 nt, Homo sapiens
  source 1..20: mol_type = genomic RNA
attataaaggccagcgccag

SEQ ID NO: 1903 - RNA, 20 nt, Homo sapiens
  source 1..20: mol_type = genomic RNA
ttataaaggccagcgccaga

SEQ ID NO: 1904 - RNA, 20 nt, Homo sapiens
  source 1..20: mol_type = genomic RNA
tataaaggccagcgccagaa

SEQ ID NO: 1905 - RNA, 20 nt, Homo sapiens
  source 1..20: mol_type = genomic RNA
ataaaggccagcgccagaac

SEQ ID NO: 1906 - RNA, 20 nt, Homo sapiens
  source 1..20: mol_type = genomic RNA
taaaggccagcgccagaacc

SEQ ID NO: 1907 - RNA, 20 nt, Homo sapiens
  source 1..20: mol_type = genomic RNA
aaaggccagcgccagaaccc

SEQ ID NO: 1908 - RNA, 20 nt, Homo sapiens
  source 1..20: mol_type = genomic RNA
aaggccagcgccagaaccca

SEQ ID NO: 1909 - RNA, 20 nt, Homo sapiens
  source 1..20: mol_type = genomic RNA
aggccagcgccagaacccag

SEQ ID NO: 1910 - RNA, 20 nt, Homo sapiens
  source 1..20: mol_type = genomic RNA
ggccagcgccagaacccaga

SEQ ID NO: 1911 - RNA, 20 nt, Homo sapiens
  source 1..20: mol_type = genomic RNA
gccagcgccagaacccagat

SEQ ID NO: 1912 - RNA, 20 nt, Homo sapiens
  source 1..20: mol_type = genomic RNA
ccagcgccagaacccagatt

SEQ ID NO: 1913 - RNA, 20 nt, Homo sapiens
  source 1..20: mol_type = genomic RNA
cagcgccagaacccagattt

SEQ ID NO: 1914 - RNA, 20 nt, Homo sapiens
  source 1..20: mol_type = genomic RNA
agcgccagaacccagatttc

SEQ ID NO: 1915 - RNA, 20 nt, Homo sapiens
  source 1..20: mol_type = genomic RNA
gcgccagaacccagatttcc

SEQ ID NO: 1916 - RNA, 20 nt, Homo sapiens
  source 1..20: mol_type = genomic RNA
cgccagaacccagatttcct

SEQ ID NO: 1917 - RNA, 20 nt, Homo sapiens
  source 1..20: mol_type = genomic RNA
gccagaacccagatttccta

SEQ ID NO: 1918 - RNA, 20 nt, Homo sapiens
  source 1..20: mol_type = genomic RNA
ccagaacccagatttcctaa

SEQ ID NO: 1919 - RNA, 20 nt, Homo sapiens
  source 1..20: mol_type = genomic RNA
cagaacccagatttcctaac

SEQ ID NO: 1920 - RNA, 20 nt, Homo sapiens
  source 1..20: mol_type = genomic RNA
agaacccagatttcctaact

SEQ ID NO: 1921 - RNA, 20 nt, Homo sapiens
  source 1..20: mol_type = genomic RNA
gaacccagatttcctaactc

SEQ ID NO: 1922 - RNA, 20 nt, Homo sapiens
  source 1..20: mol_type = genomic RNA
aacccagatttcctaactct

SEQ ID NO: 1923 - RNA, 20 nt, Homo sapiens
  source 1..20: mol_type = genomic RNA
acccagatttcctaactctg

SEQ ID NO: 1924 - RNA, 20 nt, Homo sapiens
  source 1..20: mol_type = genomic RNA
cccagatttcctaactctgg

SEQ ID NO: 1925 - RNA, 20 nt, Homo sapiens
  source 1..20: mol_type = genomic RNA
ccagatttcctaactctggt

SEQ ID NO: 1926 - RNA, 20 nt, Homo sapiens
  source 1..20: mol_type = genomic RNA
cagatttcctaactctggtg

SEQ ID NO: 1927 - RNA, 20 nt, Homo sapiens
  source 1..20: mol_type = genomic RNA
agatttcctaactctggtgc

SEQ ID NO: 1928 - RNA, 20 nt, Homo sapiens
  source 1..20: mol_type = genomic RNA
gatttcctaactctggtgct

SEQ ID NO: 1929 - RNA, 20 nt, Homo sapiens
  source 1..20: mol_type = genomic RNA
atttcctaactctggtgctc

SEQ ID NO: 1930 - RNA, 20 nt, Homo sapiens
  source 1..20: mol_type = genomic RNA
tttcctaactctggtgctct

SEQ ID NO: 1931 - RNA, 20 nt, Homo sapiens
  source 1..20: mol_type = genomic RNA
ttcctaactctggtgctctt

SEQ ID NO: 1932 - RNA, 20 nt, Homo sapiens
  source 1..20: mol_type = genomic RNA
tcctaactctggtgctcttt

SEQ ID NO: 1933 - RNA, 20 nt, Homo sapiens
  source 1..20: mol_type = genomic RNA
cctaactctggtgctctttc

SEQ ID NO: 1934 - RNA, 20 nt, Homo sapiens
  source 1..20: mol_type = genomic RNA
ctaactctggtgctctttcc

SEQ ID NO: 1935 - RNA, 20 nt, Homo sapiens
  source 1..20: mol_type = genomic RNA
taactctggtgctctttccc

SEQ ID NO: 1936 - RNA, 20 nt, Homo sapiens
  source 1..20: mol_type = genomic RNA
aactctggtgctctttccct

SEQ ID NO: 1937 - RNA, 20 nt, Homo sapiens
  source 1..20: mol_type = genomic RNA
actctggtgctctttccctt

SEQ ID NO: 1938 - RNA, 20 nt, Homo sapiens
  source 1..20: mol_type = genomic RNA
ctctggtgctctttcccttt

SEQ ID NO: 1939 - RNA, 20 nt, Homo sapiens
  source 1..20: mol_type = genomic RNA
tctggtgctctttcccttta

SEQ ID NO: 1940 - RNA, 20 nt, Homo sapiens
  source 1..20: mol_type = genomic RNA
ctggtgctctttccctttat

SEQ ID NO: 1941 - RNA, 20 nt, Homo sapiens
  source 1..20: mol_type = genomic RNA
tggtgctctttccctttatc

SEQ ID NO: 1942 - RNA, 20 nt, Homo sapiens
  source 1..20: mol_type = genomic RNA
ggtgctctttccctttatca

SEQ ID NO: 1943 - RNA, 20 nt, Homo sapiens
  source 1..20: mol_type = genomic RNA
gtgctctttccctttatcag

SEQ ID NO: 1944 - RNA, 20 nt, Homo sapiens
  source 1..20: mol_type = genomic RNA
tgctctttccctttatcagt

SEQ ID NO: 1945 - RNA, 20 nt, Homo sapiens
  source 1..20: mol_type = genomic RNA
gctctttccctttatcagtt

SEQ ID NO: 1946 - RNA, 20 nt, Homo sapiens
  source 1..20: mol_type = genomic RNA
ctctttccctttatcagttt

SEQ ID NO: 1947 - RNA, 20 nt, Homo sapiens
  source 1..20: mol_type = genomic RNA
tctttccctttatcagtttg

SEQ ID NO: 1948 - RNA, 20 nt, Homo sapiens
  source 1..20: mol_type = genomic RNA
ctttccctttatcagtttga

SEQ ID NO: 1949 - RNA, 20 nt, Homo sapiens
  source 1..20: mol_type = genomic RNA
tttccctttatcagtttgac

SEQ ID NO: 1950 - RNA, 20 nt, Homo sapiens
  source 1..20: mol_type = genomic RNA
ttccctttatcagtttgact

SEQ ID NO: 1951 - RNA, 20 nt, Homo sapiens
  source 1..20: mol_type = genomic RNA
tccctttatcagtttgactg

SEQ ID NO: 1952 - RNA, 20 nt, Homo sapiens
  source 1..20: mol_type = genomic RNA
ccctttatcagtttgactgt

SEQ ID NO: 1953 - RNA, 20 nt, Homo sapiens
  source 1..20: mol_type = genomic RNA
cctttatcagtttgactgtg

SEQ ID NO: 1954 - RNA, 20 nt, Homo sapiens
  source 1..20: mol_type = genomic RNA
ctttatcagtttgactgtgg

SEQ ID NO: 1955 - RNA, 20 nt, Homo sapiens
  source 1..20: mol_type = genomic RNA
tttatcagtttgactgtggc

SEQ ID NO: 1956 - RNA, 20 nt, Homo sapiens
  source 1..20: mol_type = genomic RNA
ttatcagtttgactgtggcc

SEQ ID NO: 1957 - RNA, 20 nt, Homo sapiens
  source 1..20: mol_type = genomic RNA
tatcagtttgactgtggcct

SEQ ID NO: 1958 - RNA, 20 nt, Homo sapiens
  source 1..20: mol_type = genomic RNA
atcagtttgactgtggcctg

SEQ ID NO: 1959 - RNA, 20 nt, Homo sapiens
  source 1..20: mol_type = genomic RNA
tcagtttgactgtggcctgt

SEQ ID NO: 1960 - RNA, 20 nt, Homo sapiens
  source 1..20: mol_type = genomic RNA
cagtttgactgtggcctgtt

SEQ ID NO: 1961 - RNA, 20 nt, Homo sapiens
  source 1..20: mol_type = genomic RNA
agtttgactgtggcctgtta

SEQ ID NO: 1962 - RNA, 20 nt, Homo sapiens
  source 1..20: mol_type = genomic RNA
gtttgactgtggcctgttaa

SEQ ID NO: 1963 - RNA, 20 nt, Homo sapiens
  source 1..20: mol_type = genomic RNA
tttgactgtggcctgttaac

SEQ ID NO: 1964 - RNA, 20 nt, Homo sapiens
  source 1..20: mol_type = genomic RNA
ttgactgtggcctgttaact

SEQ ID NO: 1965 - RNA, 20 nt, Homo sapiens
  source 1..20: mol_type = genomic RNA
tgactgtggcctgttaactg

SEQ ID NO: 1966 - RNA, 20 nt, Homo sapiens
  source 1..20: mol_type = genomic RNA
gactgtggcctgttaactgg

SEQ ID NO: 1967 - RNA, 20 nt, Homo sapiens
  source 1..20: mol_type = genomic RNA
actgtggcctgttaactggt

SEQ ID NO: 1968 - RNA, 20 nt, Homo sapiens
  source 1..20: mol_type = genomic RNA
ctgtggcctgttaactggta

SEQ ID NO: 1969 - RNA, 20 nt, Homo sapiens
  source 1..20: mol_type = genomic RNA
tgtggcctgttaactggtat

SEQ ID NO: 1970 - RNA, 20 nt, Homo sapiens
  source 1..20: mol_type = genomic RNA
gtggcctgttaactggtata

SEQ ID NO: 1971 - RNA, 20 nt, Homo sapiens
  source 1..20: mol_type = genomic RNA
tggcctgttaactggtatat

SEQ ID NO: 1972 - RNA, 20 nt, Homo sapiens
  source 1..20: mol_type = genomic RNA
ggcctgttaactggtatata

SEQ ID NO: 1973 - RNA, 20 nt, Homo sapiens
  source 1..20: mol_type = genomic RNA
gcctgttaactggtatatac

SEQ ID NO: 1974 - RNA, 20 nt, Homo sapiens
  source 1..20: mol_type = genomic RNA
cctgttaactggtatataca

SEQ ID NO: 1975 - RNA, 20 nt, Homo sapiens
  source 1..20: mol_type = genomic RNA
ctgttaactggtatatacat

SEQ ID NO: 1976 - RNA, 20 nt, Homo sapiens
  source 1..20: mol_type = genomic RNA
tgttaactggtatatacata

SEQ ID NO: 1977 - RNA, 20 nt, Homo sapiens
  source 1..20: mol_type = genomic RNA
gttaactggtatatacatat

SEQ ID NO: 1978 - RNA, 20 nt, Homo sapiens
  source 1..20: mol_type = genomic RNA
ttaactggtatatacatata

SEQ ID NO: 1979 - RNA, 20 nt, Homo sapiens
  source 1..20: mol_type = genomic RNA
taactggtatatacatatat

SEQ ID NO: 1980 - RNA, 20 nt, Homo sapiens
  source 1..20: mol_type = genomic RNA
aactggtatatacatatata

SEQ ID NO: 1981 - RNA, 20 nt, Homo sapiens
  source 1..20: mol_type = genomic RNA
actggtatatacatatatat

SEQ ID NO: 1982 - RNA, 20 nt, Homo sapiens
  source 1..20: mol_type = genomic RNA
ctggtatatacatatatatg

SEQ ID NO: 1983 - RNA, 20 nt, Homo sapiens
  source 1..20: mol_type = genomic RNA
tggtatatacatatatatgt

SEQ ID NO: 1984 - RNA, 20 nt, Homo sapiens
  source 1..20: mol_type = genomic RNA
ggtatatacatatatatgtc

SEQ ID NO: 1985 - RNA, 20 nt, Homo sapiens
  source 1..20: mol_type = genomic RNA
gtatatacatatatatgtca

SEQ ID NO: 1986 - RNA, 20 nt, Homo sapiens
  source 1..20: mol_type = genomic RNA
tatatacatatatatgtcag

SEQ ID NO: 1987 - RNA, 20 nt, Homo sapiens
  source 1..20: mol_type = genomic RNA
atatacatatatatgtcagg

SEQ ID NO: 1988 - RNA, 20 nt, Homo sapiens
  source 1..20: mol_type = genomic RNA
tatacatatatatgtcaggc

SEQ ID NO: 1989 - RNA, 20 nt, Homo sapiens
  source 1..20: mol_type = genomic RNA
atacatatatatgtcaggca

SEQ ID NO: 1990 - RNA, 20 nt, Homo sapiens
  source 1..20: mol_type = genomic RNA
tacatatatatgtcaggcaa

SEQ ID NO: 1991 - RNA, 20 nt, Homo sapiens
  source 1..20: mol_type = genomic RNA
acatatatatgtcaggcaaa

SEQ ID NO: 1992 - RNA, 20 nt, Homo sapiens
  source 1..20: mol_type = genomic RNA
catatatatgtcaggcaaag

SEQ ID NO: 1993 - RNA, 20 nt, Homo sapiens
  source 1..20: mol_type = genomic RNA
atatatatgtcaggcaaagt

SEQ ID NO: 1994 - RNA, 20 nt, Homo sapiens
  source 1..20: mol_type = genomic RNA
tatatatgtcaggcaaagtg

SEQ ID NO: 1995 - RNA, 20 nt, Homo sapiens
  source 1..20: mol_type = genomic RNA
atatatgtcaggcaaagtgc

SEQ ID NO: 1996 - RNA, 20 nt, Homo sapiens
  source 1..20: mol_type = genomic RNA
tatatgtcaggcaaagtgct

SEQ ID NO: 1997 - RNA, 20 nt, Homo sapiens
  source 1..20: mol_type = genomic RNA
atatgtcaggcaaagtgctg

SEQ ID NO: 1998 - RNA, 20 nt, Homo sapiens
  source 1..20: mol_type = genomic RNA
tatgtcaggcaaagtgctgc

SEQ ID NO: 1999 - RNA, 20 nt, Homo sapiens
  source 1..20: mol_type = genomic RNA
atgtcaggcaaagtgctgct

SEQ ID NO: 2000 - RNA, 20 nt, Homo sapiens
  source 1..20: mol_type = genomic RNA
tgtcaggcaaagtgctgctg

SEQ ID NO: 2001 - RNA, 20 nt, Homo sapiens
  source 1..20: mol_type = genomic RNA
gtcaggcaaagtgctgctgg

SEQ ID NO: 2002 - RNA, 20 nt, Homo sapiens
  source 1..20: mol_type = genomic RNA
tcaggcaaagtgctgctgga

SEQ ID NO: 2003 - RNA, 20 nt, Homo sapiens
  source 1..20: mol_type = genomic RNA
caggcaaagtgctgctggaa

SEQ ID NO: 2004 - RNA, 20 nt, Homo sapiens
  source 1..20: mol_type = genomic RNA
aggcaaagtgctgctggaag

SEQ ID NO: 2005 - RNA, 20 nt, Homo sapiens
  source 1..20: mol_type = genomic RNA
ggcaaagtgctgctggaagt

SEQ ID NO: 2006 - RNA, 20 nt, Homo sapiens
  source 1..20: mol_type = genomic RNA
gcaaagtgctgctggaagta

SEQ ID NO: 2007 - RNA, 20 nt, Homo sapiens
  source 1..20: mol_type = genomic RNA
caaagtgctgctggaagtag

SEQ ID NO: 2008 - RNA, 20 nt, Homo sapiens
  source 1..20: mol_type = genomic RNA
aaagtgctgctggaagtaga

SEQ ID NO: 2009 - RNA, 20 nt, Homo sapiens
  source 1..20: mol_type = genomic RNA
aagtgctgctggaagtagaa

SEQ ID NO: 2010 - RNA, 20 nt, Homo sapiens
  source 1..20: mol_type = genomic RNA
agtgctgctggaagtagaat

SEQ ID NO: 2011 - RNA, 20 nt, Homo sapiens
  source 1..20: mol_type = genomic RNA
gtgctgctggaagtagaatt

SEQ ID NO: 2012 - RNA, 20 nt, Homo sapiens
  source 1..20: mol_type = genomic RNA
tgctgctggaagtagaattt

SEQ ID NO: 2013 - RNA, 20 nt, Homo sapiens
  source 1..20: mol_type = genomic RNA
gctgctggaagtagaatttg

SEQ ID NO: 2014 - RNA, 20 nt, Homo sapiens
  source 1..20: mol_type = genomic RNA
ctgctggaagtagaatttgt

SEQ ID NO: 2015 - RNA, 20 nt, Homo sapiens
  source 1..20: mol_type = genomic RNA
tgctggaagtagaatttgtc

SEQ ID NO: 2016 - RNA, 20 nt, Homo sapiens
  source 1..20: mol_type = genomic RNA
gctggaagtagaatttgtcc

SEQ ID NO: 2017 - RNA, 20 nt, Homo sapiens
  source 1..20: mol_type = genomic RNA
ctggaagtagaatttgtcca

SEQ ID NO: 2018 - RNA, 20 nt, Homo sapiens
  source 1..20: mol_type = genomic RNA
tggaagtagaatttgtccaa

SEQ ID NO: 2019 - RNA, 20 nt, Homo sapiens
  source 1..20: mol_type = genomic RNA
ggaagtagaatttgtccaat

SEQ ID NO: 2020 - RNA, 20 nt, Homo sapiens
  source 1..20: mol_type = genomic RNA
gaagtagaatttgtccaata

SEQ ID NO: 2021 - RNA, 20 nt, Homo sapiens
  source 1..20: mol_type = genomic RNA
aagtagaatttgtccaataa

SEQ ID NO: 2022 - RNA, 20 nt, Homo sapiens
  source 1..20: mol_type = genomic RNA
agtagaatttgtccaataac

SEQ ID NO: 2023 - RNA, 20 nt, Homo sapiens
  source 1..20: mol_type = genomic RNA
gtagaatttgtccaataaca

SEQ ID NO: 2024 - RNA, 20 nt, Homo sapiens
  source 1..20: mol_type = genomic RNA
tagaatttgtccaataacag

SEQ ID NO: 2025 - RNA, 20 nt, Homo sapiens
  source 1..20: mol_type = genomic RNA
agaatttgtccaataacagg

SEQ ID NO: 2026 - RNA, 20 nt, Homo sapiens
  source 1..20: mol_type = genomic RNA
gaatttgtccaataacaggt

SEQ ID NO: 2027 - RNA, 20 nt, Homo sapiens
  source 1..20: mol_type = genomic RNA
aatttgtccaataacaggtc

SEQ ID NO: 2028 - RNA, 20 nt, Homo sapiens
  source 1..20: mol_type = genomic RNA
atttgtccaataacaggtca

SEQ ID NO: 2029 - RNA, 20 nt, Homo sapiens
  source 1..20: mol_type = genomic RNA
tttgtccaataacaggtcaa

SEQ ID NO: 2030 - RNA, 20 nt, Homo sapiens
  source 1..20: mol_type = genomic RNA
ttgtccaataacaggtcaac

SEQ ID NO: 2031 - RNA, 20 nt, Homo sapiens
  source 1..20: mol_type = genomic RNA
tgtccaataacaggtcaact

SEQ ID NO: 2032 - RNA, 20 nt, Homo sapiens
  source 1..20: mol_type = genomic RNA
gtccaataacaggtcaactt

SEQ ID NO: 2033 - RNA, 20 nt, Homo sapiens
  source 1..20: mol_type = genomic RNA
tccaataacaggtcaacttc

SEQ ID NO: 2034 - RNA, 20 nt, Homo sapiens
  source 1..20: mol_type = genomic RNA
ccaataacaggtcaacttca

SEQ ID NO: 2035 - RNA, 20 nt, Homo sapiens
  source 1..20: mol_type = genomic RNA
caataacaggtcaacttcag

SEQ ID NO: 2036 - RNA, 20 nt, Homo sapiens
  source 1..20: mol_type = genomic RNA
aataacaggtcaacttcaga

SEQ ID NO: 2037 - RNA, 20 nt, Homo sapiens
  source 1..20: mol_type = genomic RNA
ataacaggtcaacttcagag

SEQ ID NO: 2038 - RNA, 20 nt, Homo sapiens
  source 1..20: mol_type = genomic RNA
taacaggtcaacttcagaga

SEQ ID NO: 2039 - RNA, 20 nt, Homo sapiens
  source 1..20: mol_type = genomic RNA
aacaggtcaacttcagagac

SEQ ID NO: 2040 - RNA, 20 nt, Homo sapiens
  source 1..20: mol_type = genomic RNA
acaggtcaacttcagagact

SEQ ID NO: 2041 - RNA, 20 nt, Homo sapiens
  source 1..20: mol_type = genomic RNA
caggtcaacttcagagacta

SEQ ID NO: 2042 - RNA, 20 nt, Homo sapiens
  source 1..20: mol_type = genomic RNA
aggtcaacttcagagactat

SEQ ID NO: 2043 - RNA, 20 nt, Homo sapiens
  source 1..20: mol_type = genomic RNA
ggtcaacttcagagactatc

SEQ ID NO: 2044 - RNA, 20 nt, Homo sapiens
  source 1..20: mol_type = genomic RNA
gtcaacttcagagactatct

SEQ ID NO: 2045 - RNA, 20 nt, Homo sapiens
  source 1..20: mol_type = genomic RNA
tcaacttcagagactatctg

SEQ ID NO: 2046 - RNA, 20 nt, Homo sapiens
  source 1..20: mol_type = genomic RNA
caacttcagagactatctga

SEQ ID NO: 2047 - RNA, 20 nt, Homo sapiens
  source 1..20: mol_type = genomic RNA
aacttcagagactatctgat

SEQ ID NO: 2048 - RNA, 20 nt, Homo sapiens
  source 1..20: mol_type = genomic RNA
acttcagagactatctgatt

SEQ ID NO: 2049 - RNA, 20 nt, Homo sapiens
  source 1..20: mol_type = genomic RNA
cttcagagactatctgattt

SEQ ID NO: 2050 - RNA, 20 nt, Homo sapiens
  source 1..20: mol_type = genomic RNA
ttcagagactatctgatttc

SEQ ID NO: 2051 - RNA, 20 nt, Homo sapiens
  source 1..20: mol_type = genomic RNA
tcagagactatctgatttcc

SEQ ID NO: 2052 - RNA, 20 nt, Homo sapiens
  source 1..20: mol_type = genomic RNA
cagagactatctgatttcct

SEQ ID NO: 2053 - RNA, 20 nt, Homo sapiens
  source 1..20: mol_type = genomic RNA
agagactatctgatttccta

SEQ ID NO: 2054 - RNA, 20 nt, Homo sapiens
  source 1..20: mol_type = genomic RNA
gagactatctgatttcctaa

SEQ ID NO: 2055 - RNA, 20 nt, Homo sapiens
  source 1..20: mol_type = genomic RNA
agactatctgatttcctaat

SEQ ID NO: 2056 - RNA, 20 nt, Homo sapiens
  source 1..20: mol_type = genomic RNA
gactatctgatttcctaatg

SEQ ID NO: 2057 - RNA, 20 nt, Homo sapiens
  source 1..20: mol_type = genomic RNA
actatctgatttcctaatgt

SEQ ID NO: 2058 - RNA, 20 nt, Homo sapiens
  source 1..20: mol_type = genomic RNA
ctatctgatttcctaatgtc

SEQ ID NO: 2059 - RNA, 20 nt, Homo sapiens
  source 1..20: mol_type = genomic RNA
tatctgatttcctaatgtca

SEQ ID NO: 2060 - RNA, 20 nt, Homo sapiens
  source 1..20: mol_type = genomic RNA
atctgatttcctaatgtcag

SEQ ID NO: 2061 - RNA, 20 nt, Homo sapiens
  source 1..20: mol_type = genomic RNA
tctgatttcctaatgtcaga

SEQ ID NO: 2062 - RNA, 20 nt, Homo sapiens
  source 1..20: mol_type = genomic RNA
ctgatttcctaatgtcagag

SEQ ID NO: 2063 - RNA, 20 nt, Homo sapiens
  source 1..20: mol_type = genomic RNA
tgatttcctaatgtcagagt

SEQ ID NO: 2064 - RNA, 20 nt, Homo sapiens
  source 1..20: mol_type = genomic RNA
gatttcctaatgtcagagta

SEQ ID NO: 2065 - RNA, 20 nt, Homo sapiens
  source 1..20: mol_type = genomic RNA
atttcctaatgtcagagtag

SEQ ID NO: 2066 - RNA, 20 nt, Homo sapiens
  source 1..20: mol_type = genomic RNA
tttcctaatgtcagagtaga

SEQ ID NO: 2067 - RNA, 20 nt, Homo sapiens
  source 1..20: mol_type = genomic RNA
ttcctaatgtcagagtagaa

SEQ ID NO: 2068 - RNA, 20 nt, Homo sapiens
  source 1..20: mol_type = genomic RNA
tcctaatgtcagagtagaag

SEQ ID NO: 2069 - RNA, 20 nt, Homo sapiens
  source 1..20: mol_type = genomic RNA
cctaatgtcagagtagaaga

SEQ ID NO: 2070 - RNA, 20 nt, Homo sapiens
  source 1..20: mol_type = genomic RNA
ctaatgtcagagtagaagat

SEQ ID NO: 2071 - RNA, 20 nt, Homo sapiens
  source 1..20: mol_type = genomic RNA
taatgtcagagtagaagatt

SEQ ID NO: 2072 - RNA, 20 nt, Homo sapiens
  source 1..20: mol_type = genomic RNA
aatgtcagagtagaagattt

SEQ ID NO: 2073 - RNA, 20 nt, Homo sapiens
  source 1..20: mol_type = genomic RNA
atgtcagagtagaagatttt

SEQ ID NO: 2074 - RNA, 20 nt, Homo sapiens
  source 1..20: mol_type = genomic RNA
tgtcagagtagaagatttta

SEQ ID NO: 2075 - RNA, 20 nt, Homo sapiens
  source 1..20: mol_type = genomic RNA
gtcagagtagaagattttat

SEQ ID NO: 2076 - RNA, 20 nt, Homo sapiens
  source 1..20: mol_type = genomic RNA
tcagagtagaagattttatg

SEQ ID NO: 2077 - RNA, 20 nt, Homo sapiens
  source 1..20: mol_type = genomic RNA
cagagtagaagattttatgc

SEQ ID NO: 2078 - RNA, 20 nt, Homo sapiens
  source 1..20: mol_type = genomic RNA
agagtagaagattttatgct

SEQ ID NO: 2079 - RNA, 20 nt, Homo sapiens
  source 1..20: mol_type = genomic RNA
gagtagaagattttatgctg

SEQ ID NO: 2080 - RNA, 20 nt, Homo sapiens
  source 1..20: mol_type = genomic RNA
agtagaagattttatgctgc

SEQ ID NO: 2081 - RNA, 20 nt, Homo sapiens
  source 1..20: mol_type = genomic RNA
gtagaagattttatgctgct

SEQ ID NO: 2082 - RNA, 20 nt, Homo sapiens
  source 1..20: mol_type = genomic RNA
tagaagattttatgctgctg

SEQ ID NO: 2083 - RNA, 20 nt, Homo sapiens
  source 1..20: mol_type = genomic RNA
agaagattttatgctgctgt

SEQ ID NO: 2084 - RNA, 20 nt, Homo sapiens
  source 1..20: mol_type = genomic RNA
gaagattttatgctgctgtt

SEQ ID NO: 2085 - RNA, 20 nt, Homo sapiens
  source 1..20: mol_type = genomic RNA
aagattttatgctgctgttt

SEQ ID NO: 2086 - RNA, 20 nt, Homo sapiens
  source 1..20: mol_type = genomic RNA
agattttatgctgctgttta

SEQ ID NO: 2087 - RNA, 20 nt, Homo sapiens
  source 1..20: mol_type = genomic RNA
gattttatgctgctgtttac

SEQ ID NO: 2088 - RNA, 20 nt, Homo sapiens
  source 1..20: mol_type = genomic RNA
attttatgctgctgtttaca

SEQ ID NO: 2089 - RNA, 20 nt, Homo sapiens
  source 1..20: mol_type = genomic RNA
ttttatgctgctgtttacaa

SEQ ID NO: 2090 - RNA, 20 nt, Homo sapiens
  source 1..20: mol_type = genomic RNA
tttatgctgctgtttacaaa

SEQ ID NO: 2091 - RNA, 20 nt, Homo sapiens
  source 1..20: mol_type = genomic RNA
ttatgctgctgtttacaaaa

SEQ ID NO: 2092 - RNA, 20 nt, Homo sapiens
  source 1..20: mol_type = genomic RNA
tatgctgctgtttacaaaag

SEQ ID NO: 2093 - RNA, 20 nt, Homo sapiens
  source 1..20: mol_type = genomic RNA
atgctgctgtttacaaaagc

SEQ ID NO: 2094 - RNA, 20 nt, Homo sapiens
  source 1..20: mol_type = genomic RNA
tgctgctgtttacaaaagcc

SEQ ID NO: 2095 - RNA, 20 nt, Homo sapiens
  source 1..20: mol_type = genomic RNA
gctgctgtttacaaaagccc

SEQ ID NO: 2096 - RNA, 20 nt, Homo sapiens
  source 1..20: mol_type = genomic RNA
ctgctgtttacaaaagccca

SEQ ID NO: 2097 - RNA, 20 nt, Homo sapiens
  source 1..20: mol_type = genomic RNA
tgctgtttacaaaagcccaa

SEQ ID NO: 2098 - RNA, 20 nt, Homo sapiens
  source 1..20: mol_type = genomic RNA
gctgtttacaaaagcccaat

SEQ ID NO: 2099 - RNA, 20 nt, Homo sapiens
  source 1..20: mol_type = genomic RNA
ctgtttacaaaagcccaatg

SEQ ID NO: 2100 - RNA, 20 nt, Homo sapiens
  source 1..20: mol_type = genomic RNA
tgtttacaaaagcccaatgt

SEQ ID NO: 2101 - RNA, 20 nt, Homo sapiens
  source 1..20: mol_type = genomic RNA
gtttacaaaagcccaatgta

SEQ ID NO: 2102 - RNA, 20 nt, Homo sapiens
  source 1..20: mol_type = genomic RNA
tttacaaaagcccaatgtaa

SEQ ID NO: 2103 - RNA, 20 nt, Homo sapiens
  source 1..20: mol_type = genomic RNA
ttacaaaagcccaatgtaat

SEQ ID NO: 2104 - RNA, 20 nt, Homo sapiens
  source 1..20: mol_type = genomic RNA
tacaaaagcccaatgtaatg

SEQ ID NO: 2105 - RNA, 20 nt, Homo sapiens
  source 1..20: mol_type = genomic RNA
acaaaagcccaatgtaatgc

SEQ ID NO: 2106 - RNA, 20 nt, Homo sapiens
  source 1..20: mol_type = genomic RNA
caaaagcccaatgtaatgca

SEQ ID NO: 2107 - RNA, 20 nt, Homo sapiens
  source 1..20: mol_type = genomic RNA
aaaagcccaatgtaatgcat

SEQ ID NO: 2108 - RNA, 20 nt, Homo sapiens
  source 1..20: mol_type = genomic RNA
aaagcccaatgtaatgcata

SEQ ID NO: 2109 - RNA, 20 nt, Homo sapiens
  source 1..20: mol_type = genomic RNA
aagcccaatgtaatgcatag

SEQ ID NO: 2110 - RNA, 20 nt, Homo sapiens
  source 1..20: mol_type = genomic RNA
agcccaatgtaatgcatagg

SEQ ID NO: 2111 - RNA, 20 nt, Homo sapiens
  source 1..20: mol_type = genomic RNA
gcccaatgtaatgcatagga

SEQ ID NO: 2112 - RNA, 20 nt, Homo sapiens
  source 1..20: mol_type = genomic RNA
cccaatgtaatgcataggaa

SEQ ID NO: 2113 - RNA, 20 nt, Homo sapiens
  source 1..20: mol_type = genomic RNA
ccaatgtaatgcataggaag

SEQ ID NO: 2114 - RNA, 20 nt, Homo sapiens
  source 1..20: mol_type = genomic RNA
caatgtaatgcataggaagt

SEQ ID NO: 2115 - RNA, 20 nt, Homo sapiens
  source 1..20: mol_type = genomic RNA
aatgtaatgcataggaagta

SEQ ID NO: 2116 - RNA, 20 nt, Homo sapiens
  source 1..20: mol_type = genomic RNA
atgtaatgcataggaagtat

SEQ ID NO: 2117 - RNA, 20 nt, Homo sapiens
  source 1..20: mol_type = genomic RNA
tgtaatgcataggaagtatg

SEQ ID NO: 2118 - RNA, 20 nt, Homo sapiens
  source 1..20: mol_type = genomic RNA
gtaatgcataggaagtatgg

SEQ ID NO: 2119 - RNA, 20 nt, Homo sapiens
  source 1..20: mol_type = genomic RNA
taatgcataggaagtatggc

SEQ ID NO: 2120 - RNA, 20 nt, Homo sapiens
  source 1..20: mol_type = genomic RNA
aatgcataggaagtatggca

SEQ ID NO: 2121 - RNA, 20 nt, Homo sapiens
  source 1..20: mol_type = genomic RNA
atgcataggaagtatggcat

SEQ ID NO: 2122 - RNA, 20 nt, Homo sapiens
  source 1..20: mol_type = genomic RNA
tgcataggaagtatggcatg

SEQ ID NO: 2123 - RNA, 20 nt, Homo sapiens
  source 1..20: mol_type = genomic RNA
gcataggaagtatggcatga

SEQ ID NO: 2124 - RNA, 20 nt, Homo sapiens
  source 1..20: mol_type = genomic RNA
cataggaagtatggcatgaa

SEQ ID NO: 2125 - RNA, 20 nt, Homo sapiens
  source 1..20: mol_type = genomic RNA
ataggaagtatggcatgaac

SEQ ID NO: 2126 - RNA, 20 nt, Homo sapiens
  source 1..20: mol_type = genomic RNA
taggaagtatggcatgaaca

SEQ ID NO: 2127 - RNA, 20 nt, Homo sapiens
  source 1..20: mol_type = genomic RNA
aggaagtatggcatgaacat

SEQ ID NO: 2128 - RNA, 20 nt, Homo sapiens
  source 1..20: mol_type = genomic RNA
ggaagtatggcatgaacatc

SEQ ID NO: 2129 - RNA, 20 nt, Homo sapiens
  source 1..20: mol_type = genomic RNA
gaagtatggcatgaacatct

SEQ ID NO: 2130 - RNA, 20 nt, Homo sapiens
  source 1..20: mol_type = genomic RNA
aagtatggcatgaacatctt

SEQ ID NO: 2131 - RNA, 20 nt, Homo sapiens
  source 1..20: mol_type = genomic RNA
agtatggcatgaacatcttt

SEQ ID NO: 2132 - RNA, 20 nt, Homo sapiens
  source 1..20: mol_type = genomic RNA
gtatggcatgaacatcttta

SEQ ID NO: 2133 - RNA, 20 nt, Homo sapiens
  source 1..20: mol_type = genomic RNA
tatggcatgaacatctttag

SEQ ID NO: 2134 - RNA, 20 nt, Homo sapiens
  source 1..20: mol_type = genomic RNA
atggcatgaacatctttagg

SEQ ID NO: 2135 - RNA, 20 nt, Homo sapiens
  source 1..20: mol_type = genomic RNA
tggcatgaacatctttagga

SEQ ID NO: 2136 - RNA, 20 nt, Homo sapiens
  source 1..20: mol_type = genomic RNA
ggcatgaacatctttaggag

SEQ ID NO: 2137 - RNA, 20 nt, Homo sapiens
  source 1..20: mol_type = genomic RNA
gcatgaacatctttaggaga

SEQ ID NO: 2138 - RNA, 20 nt, Homo sapiens
  source 1..20: mol_type = genomic RNA
catgaacatctttaggagac

SEQ ID NO: 2139 - RNA, 20 nt, Homo sapiens
  source 1..20: mol_type = genomic RNA
atgaacatctttaggagact

SEQ ID NO: 2140 - RNA, 20 nt, Homo sapiens
  source 1..20: mol_type = genomic RNA
tgaacatctttaggagacta

SEQ ID NO: 2141 - RNA, 20 nt, Homo sapiens
  source 1..20: mol_type = genomic RNA
gaacatctttaggagactaa

SEQ ID NO: 2142 - RNA, 20 nt, Homo sapiens
  source 1..20: mol_type = genomic RNA
aacatctttaggagactaat

SEQ ID NO: 2143 - RNA, 20 nt, Homo sapiens
  source 1..20: mol_type = genomic RNA
acatctttaggagactaatg

SEQ ID NO: 2144 - RNA, 20 nt, Homo sapiens
  source 1..20: mol_type = genomic RNA
catctttaggagactaatgg

SEQ ID NO: 2145 - RNA, 20 nt, Homo sapiens
  source 1..20: mol_type = genomic RNA
atctttaggagactaatgga

SEQ ID NO: 2146 - RNA, 20 nt, Homo sapiens
  source 1..20: mol_type = genomic RNA
tctttaggagactaatggaa

SEQ ID NO: 2147 - RNA, 20 nt, Homo sapiens
  source 1..20: mol_type = genomic RNA
ctttaggagactaatggaaa

SEQ ID NO: 2148 - RNA, 20 nt, Homo sapiens
  source 1..20: mol_type = genomic RNA
tttaggagactaatggaaat

SEQ ID NO: 2149 - RNA, 20 nt, Homo sapiens
  source 1..20: mol_type = genomic RNA
ttaggagactaatggaaata

SEQ ID NO: 2150 - RNA, 20 nt, Homo sapiens
  source 1..20: mol_type = genomic RNA
taggagactaatggaaatat

SEQ ID NO: 2151 - RNA, 20 nt, Homo sapiens
  source 1..20: mol_type = genomic RNA
aggagactaatggaaatatt

SEQ ID NO: 2152 - RNA, 20 nt, Homo sapiens
  source 1..20: mol_type = genomic RNA
ggagactaatggaaatatta

SEQ ID NO: 2153 - RNA, 20 nt, Homo sapiens
  source 1..20: mol_type = genomic RNA
gagactaatggaaatattat

SEQ ID NO: 2154 - RNA, 20 nt, Homo sapiens
  source 1..20: mol_type = genomic RNA
agactaatggaaatattatt

SEQ ID NO: 2155 - RNA, 20 nt, Homo sapiens
  source 1..20: mol_type = genomic RNA
gactaatggaaatattattg

SEQ ID NO: 2156 - RNA, 20 nt, Homo sapiens
  source 1..20: mol_type = genomic RNA
actaatggaaatattattgg

SEQ ID NO: 2157 - RNA, 20 nt, Homo sapiens
  source 1..20: mol_type = genomic RNA
ctaatggaaatattattggt

SEQ ID NO: 2158 - RNA, 20 nt, Homo sapiens
  source 1..20: mol_type = genomic RNA
taatggaaatattattggtg

SEQ ID NO: 2159 - RNA, 20 nt, Homo sapiens
  source 1..20: mol_type = genomic RNA
aatggaaatattattggtgt

SEQ ID NO: 2160 - RNA, 20 nt, Homo sapiens
  source 1..20: mol_type = genomic RNA
atggaaatattattggtgtt

SEQ ID NO: 2161 - RNA, 20 nt, Homo sapiens
  source 1..20: mol_type = genomic RNA
tggaaatattattggtgttt

SEQ ID NO: 2162 - RNA, 20 nt, Homo sapiens
  source 1..20: mol_type = genomic RNA
ggaaatattattggtgttta

SEQ ID NO: 2163 - RNA, 20 nt, Homo sapiens
  source 1..20: mol_type = genomic RNA
gaaatattattggtgtttac

SEQ ID NO: 2164 - RNA, 20 nt, Homo sapiens
  source 1..20: mol_type = genomic RNA
aaatattattggtgtttacc

SEQ ID NO: 2165 - RNA, 20 nt, Homo sapiens
  source 1..20: mol_type = genomic RNA
aatattattggtgtttaccc

SEQ ID NO: 2166 - RNA, 20 nt, Homo sapiens
  source 1..20: mol_type = genomic RNA
atattattggtgtttaccca

SEQ ID NO: 2167 - RNA, 20 nt, Homo sapiens
  source 1..20: mol_type = genomic RNA
tattattggtgtttacccag

SEQ ID NO: 2168 - RNA, 20 nt, Homo sapiens
  source 1..20: mol_type = genomic RNA
attattggtgtttacccagt

SEQ ID NO: 2169 - RNA, 20 nt, Homo sapiens
  source 1..20: mol_type = genomic RNA
ttattggtgtttacccagta

SEQ ID NO: 2170 - RNA, 20 nt, Homo sapiens
  source 1..20: mol_type = genomic RNA
tattggtgtttacccagtat

SEQ ID NO: 2171 - RNA, 20 nt, Homo sapiens
  source 1..20: mol_type = genomic RNA
attggtgtttacccagtatt

SEQ ID NO: 2172 - RNA, 20 nt, Homo sapiens
  source 1..20: mol_type = genomic RNA
ttggtgtttacccagtattc

SEQ ID NO: 2173 - RNA, 20 nt, Homo sapiens
  source 1..20: mol_type = genomic RNA
tggtgtttacccagtattcc

SEQ ID NO: 2174 - RNA, 20 nt, Homo sapiens
  source 1..20: mol_type = genomic RNA
ggtgtttacccagtattcca

SEQ ID NO: 2175 - RNA, 20 nt, Homo sapiens
  source 1..20: mol_type = genomic RNA
gtgtttacccagtattccat

SEQ ID NO: 2176 - RNA, 20 nt, Homo sapiens
  source 1..20: mol_type = genomic RNA
tgtttacccagtattccatt

SEQ ID NO: 2177 - RNA, 20 nt, Homo sapiens
  source 1..20: mol_type = genomic RNA
gtttacccagtattccattt

SEQ ID NO: 2178 - RNA, 20 nt, Homo sapiens
  source 1..20: mol_type = genomic RNA
tttacccagtattccatttt

SEQ ID NO: 2179 - RNA, 20 nt, Homo sapiens
  source 1..20: mol_type = genomic RNA
ttacccagtattccattttt

SEQ ID NO: 2180 - RNA, 20 nt, Homo sapiens
  source 1..20: mol_type = genomic RNA
tacccagtattccatttttt

SEQ ID NO: 2181 - RNA, 20 nt, Homo sapiens
  source 1..20: mol_type = genomic RNA
acccagtattccattttttt

SEQ ID NO: 2182 - RNA, 20 nt, Homo sapiens
  source 1..20: mol_type = genomic RNA
cccagtattccatttttttc

SEQ ID NO: 2183 - RNA, 20 nt, Homo sapiens
  source 1..20: mol_type = genomic RNA
ccagtattccatttttttca

SEQ ID NO: 2184 - RNA, 20 nt, Homo sapiens
  source 1..20: mol_type = genomic RNA
cagtattccatttttttcat

SEQ ID NO: 2185 - RNA, 20 nt, Homo sapiens
  source 1..20: mol_type = genomic RNA
agtattccatttttttcatt

SEQ ID NO: 2186 - RNA, 20 nt, Homo sapiens
  source 1..20: mol_type = genomic RNA
gtattccatttttttcattg

SEQ ID NO: 2187 - RNA, 20 nt, Homo sapiens
  source 1..20: mol_type = genomic RNA
tattccatttttttcattgt

SEQ ID NO: 2188 - RNA, 20 nt, Homo sapiens
  source 1..20: mol_type = genomic RNA
attccatttttttcattgtg

SEQ ID NO: 2189 - RNA, 20 nt, Homo sapiens
  source 1..20: mol_type = genomic RNA
ttccatttttttcattgtgt

SEQ ID NO: 2190 - RNA, 20 nt, Homo sapiens
  source 1..20: mol_type = genomic RNA
tccatttttttcattgtgtt

SEQ ID NO: 2191 - RNA, 20 nt, Homo sapiens
  source 1..20: mol_type = genomic RNA
ccatttttttcattgtgttc

SEQ ID NO: 2192 - RNA, 20 nt, Homo sapiens
  source 1..20: mol_type = genomic RNA
catttttttcattgtgttct

SEQ ID NO: 2193 - RNA, 20 nt, Homo sapiens
  source 1..20: mol_type = genomic RNA
atttttttcattgtgttctc

SEQ ID NO: 2194 - RNA, 20 nt, Homo sapiens
  source 1..20: mol_type = genomic RNA
tttttttcattgtgttctct

SEQ ID NO: 2195 - RNA, 20 nt, Homo sapiens
  source 1..20: mol_type = genomic RNA
ttttttcattgtgttctcta

SEQ ID NO: 2196 - RNA, 20 nt, Homo sapiens
  source 1..20: mol_type = genomic RNA
tttttcattgtgttctctat

SEQ ID NO: 2197 - RNA, 20 nt, Homo sapiens
  source 1..20: mol_type = genomic RNA
ttttcattgtgttctctatt

SEQ ID NO: 2198 - RNA, 20 nt, Homo sapiens
  source 1..20: mol_type = genomic RNA
tttcattgtgttctctattg

SEQ ID NO: 2199 - RNA, 20 nt, Homo sapiens
  source 1..20: mol_type = genomic RNA
ttcattgtgttctctattgc

SEQ ID NO: 2200 - RNA, 20 nt, Homo sapiens
  source 1..20: mol_type = genomic RNA
tcattgtgttctctattgct

SEQ ID NO: 2201 - RNA, 20 nt, Homo sapiens
  source 1..20: mol_type = genomic RNA
cattgtgttctctattgctg

SEQ ID NO: 2202 - RNA, 20 nt, Homo sapiens
  source 1..20: mol_type = genomic RNA
attgtgttctctattgctgc

SEQ ID NO: 2203 - RNA, 20 nt, Homo sapiens
  source 1..20: mol_type = genomic RNA
ttgtgttctctattgctgct

SEQ ID NO: 2204 - RNA, 20 nt, Homo sapiens
  source 1..20: mol_type = genomic RNA
tgtgttctctattgctgctc

SEQ ID NO: 2205 - RNA, 20 nt, Homo sapiens
  source 1..20: mol_type = genomic RNA
gtgttctctattgctgctct

SEQ ID NO: 2206 - RNA, 20 nt, Homo sapiens
  source 1..20: mol_type = genomic RNA
tgttctctattgctgctctc

SEQ ID NO: 2207 - RNA, 20 nt, Homo sapiens
  source 1..20: mol_type = genomic RNA
gttctctattgctgctctct

SEQ ID NO: 2208 - RNA, 20 nt, Homo sapiens
  source 1..20: mol_type = genomic RNA
ttctctattgctgctctctc

SEQ ID NO: 2209 - RNA, 20 nt, Homo sapiens
  source 1..20: mol_type = genomic RNA
tctctattgctgctctctca

SEQ ID NO: 2210 - RNA, 20 nt, Homo sapiens
  source 1..20: mol_type = genomic RNA
ctctattgctgctctctcac

SEQ ID NO: 2211 - RNA, 20 nt, Homo sapiens
  source 1..20: mol_type = genomic RNA
tctattgctgctctctcact

SEQ ID NO: 2212 - RNA, 20 nt, Homo sapiens
  source 1..20: mol_type = genomic RNA
ctattgctgctctctcactc

SEQ ID NO: 2213 - RNA, 20 nt, Homo sapiens
  source 1..20: mol_type = genomic RNA
tattgctgctctctcactcc

SEQ ID NO: 2214 - RNA, 20 nt, Homo sapiens
  source 1..20: mol_type = genomic RNA
attgctgctctctcactccc

SEQ ID NO: 2215 - RNA, 20 nt, Homo sapiens
  source 1..20: mol_type = genomic RNA
ttgctgctctctcactcccc

SEQ ID NO: 2216 - RNA, 20 nt, Homo sapiens
  source 1..20: mol_type = genomic RNA
tgctgctctctcactccccc

SEQ ID NO: 2217 - RNA, 20 nt, Homo sapiens
  source 1..20: mol_type = genomic RNA
gctgctctctcactccccca

SEQ ID NO: 2218 - RNA, 20 nt, Homo sapiens
  source 1..20: mol_type = genomic RNA
ctgctctctcactcccccat

SEQ ID NO: 2219 - RNA, 20 nt, Homo sapiens
  source 1..20: mol_type = genomic RNA
tgctctctcactcccccatg

SEQ ID NO: 2220 - RNA, 20 nt, Homo sapiens
  source 1..20: mol_type = genomic RNA
gctctctcactcccccatga

SEQ ID NO: 2221 - RNA, 20 nt, Homo sapiens
  source 1..20: mol_type = genomic RNA
ctctctcactcccccatgag

SEQ ID NO: 2222 - RNA, 20 nt, Homo sapiens
  source 1..20: mol_type = genomic RNA
tctctcactcccccatgagg

SEQ ID NO: 2223 - RNA, 20 nt, Homo sapiens
  source 1..20: mol_type = genomic RNA
ctctcactcccccatgaggt

SEQ ID NO: 2224 - RNA, 20 nt, Homo sapiens
  source 1..20: mol_type = genomic RNA
tctcactcccccatgaggta

SEQ ID NO: 2225 - RNA, 20 nt, Homo sapiens
  source 1..20: mol_type = genomic RNA
ctcactcccccatgaggtac

SEQ ID NO: 2226 - RNA, 20 nt, Homo sapiens
  source 1..20: mol_type = genomic RNA
tcactcccccatgaggtaca

SEQ ID NO: 2227 - RNA, 20 nt, Homo sapiens
  source 1..20: mol_type = genomic RNA
cactcccccatgaggtacag

SEQ ID NO: 2228 - RNA, 20 nt, Homo sapiens
  source 1..20: mol_type = genomic RNA
actcccccatgaggtacagc

SEQ ID NO: 2229 - RNA, 20 nt, Homo sapiens
  source 1..20: mol_type = genomic RNA
ctcccccatgaggtacagca

SEQ ID NO: 2230 - RNA, 20 nt, Homo sapiens
  source 1..20: mol_type = genomic RNA
tcccccatgaggtacagcag

SEQ ID NO: 2231 - RNA, 20 nt, Homo sapiens
  source 1..20: mol_type = genomic RNA
cccccatgaggtacagcaga

SEQ ID NO: 2232 - RNA, 20 nt, Homo sapiens
  source 1..20: mol_type = genomic RNA
ccccatgaggtacagcagaa

SEQ ID NO: 2233 - RNA, 20 nt, Homo sapiens
  source 1..20: mol_type = genomic RNA
cccatgaggtacagcagaaa

SEQ ID NO: 2234 - RNA, 20 nt, Homo sapiens
  source 1..20: mol_type = genomic RNA
ccatgaggtacagcagaaag

SEQ ID NO: 2235 - RNA, 20 nt, Homo sapiens
  source 1..20: mol_type = genomic RNA
catgaggtacagcagaaagg

SEQ ID NO: 2236 - RNA, 20 nt, Homo sapiens
  source 1..20: mol_type = genomic RNA
atgaggtacagcagaaagga

SEQ ID NO: 2237 - RNA, 20 nt, Homo sapiens
  source 1..20: mol_type = genomic RNA
tgaggtacagcagaaaggag

SEQ ID NO: 2238 - RNA, 20 nt, Homo sapiens
  source 1..20: mol_type = genomic RNA
gaggtacagcagaaaggaga

SEQ ID NO: 2239 - RNA, 20 nt, Homo sapiens
  source 1..20: mol_type = genomic RNA
aggtacagcagaaaggagaa

SEQ ID NO: 2240 - RNA, 20 nt, Homo sapiens
  source 1..20: mol_type = genomic RNA
ggtacagcagaaaggagaac

SEQ ID NO: 2241 - RNA, 20 nt, Homo sapiens
  source 1..20: mol_type = genomic RNA
gtacagcagaaaggagaact

SEQ ID NO: 2242 - RNA, 20 nt, Homo sapiens
  source 1..20: mol_type = genomic RNA
tacagcagaaaggagaacta

SEQ ID NO: 2243 - RNA, 20 nt, Homo sapiens
  source 1..20: mol_type = genomic RNA
acagcagaaaggagaactat

SEQ ID NO: 2244 - RNA, 20 nt, Homo sapiens
  source 1..20: mol_type = genomic RNA
cagcagaaaggagaactatc

SEQ ID NO: 2245 - RNA, 20 nt, Homo sapiens
  source 1..20: mol_type = genomic RNA
agcagaaaggagaactatcc

SEQ ID NO: 2246 - RNA, 20 nt, Homo sapiens
  source 1..20: mol_type = genomic RNA
gcagaaaggagaactatcca

SEQ ID NO: 2247 - RNA, 20 nt, Homo sapiens
  source 1..20: mol_type = genomic RNA
cagaaaggagaactatccaa

SEQ ID NO: 2248 - RNA, 20 nt, Homo sapiens
  source 1..20: mol_type = genomic RNA
agaaaggagaactatccaaa

SEQ ID NO: 2249 - RNA, 20 nt, Homo sapiens
  source 1..20: mol_type = genomic RNA
gaaaggagaactatccaaaa

SEQ ID NO: 2250 - RNA, 20 nt, Homo sapiens
  source 1..20: mol_type = genomic RNA
aaaggagaactatccaaaac

SEQ ID NO: 2251 - RNA, 20 nt, Homo sapiens
  source 1..20: mol_type = genomic RNA
aaggagaactatccaaaact

SEQ ID NO: 2252 - RNA, 20 nt, Homo sapiens
  source 1..20: mol_type = genomic RNA
aggagaactatccaaaacta

SEQ ID NO: 2253 - RNA, 20 nt, Homo sapiens
  source 1..20: mol_type = genomic RNA
ggagaactatccaaaactaa

SEQ ID NO: 2254 - RNA, 20 nt, Homo sapiens
  source 1..20: mol_type = genomic RNA
gagaactatccaaaactaat

SEQ ID NO: 2255 - RNA, 20 nt, Homo sapiens
  source 1..20: mol_type = genomic RNA
agaactatccaaaactaatt

SEQ ID NO: 2256 - RNA, 20 nt, Homo sapiens
  source 1..20: mol_type = genomic RNA
gaactatccaaaactaattt

SEQ ID NO: 2257 - RNA, 20 nt, Homo sapiens
  source 1..20: mol_type = genomic RNA
aactatccaaaactaatttc

SEQ ID NO: 2258 - RNA, 20 nt, Homo sapiens
  source 1..20: mol_type = genomic RNA
actatccaaaactaatttcc

SEQ ID NO: 2259 - RNA, 20 nt, Homo sapiens
  source 1..20: mol_type = genomic RNA
ctatccaaaactaatttcct

SEQ ID NO: 2260 - RNA, 20 nt, Homo sapiens
  source 1..20: mol_type = genomic RNA
tatccaaaactaatttcctc

SEQ ID NO: 2261 - RNA, 20 nt, Homo sapiens
  source 1..20: mol_type = genomic RNA
atccaaaactaatttcctct

SEQ ID NO: 2262 - RNA, 20 nt, Homo sapiens
  source 1..20: mol_type = genomic RNA
tccaaaactaatttcctctg

SEQ ID NO: 2263 - RNA, 20 nt, Homo sapiens
  source 1..20: mol_type = genomic RNA
ccaaaactaatttcctctga

SEQ ID NO: 2264 - RNA, 20 nt, Homo sapiens
  source 1..20: mol_type = genomic RNA
caaaactaatttcctctgac

SEQ ID NO: 2265 - RNA, 20 nt, Homo sapiens
  source 1..20: mol_type = genomic RNA
aaaactaatttcctctgaca

SEQ ID NO: 2266 - RNA, 20 nt, Homo sapiens
  source 1..20: mol_type = genomic RNA
aaactaatttcctctgacat

SEQ ID NO: 2267 - RNA, 20 nt, Homo sapiens
  source 1..20: mol_type = genomic RNA
aactaatttcctctgacatg

SEQ ID NO: 2268 - RNA, 20 nt, Homo sapiens
  source 1..20: mol_type = genomic RNA
actaatttcctctgacatgt

SEQ ID NO: 2269 - RNA, 20 nt, Homo sapiens
  source 1..20: mol_type = genomic RNA
ctaatttcctctgacatgta

SEQ ID NO: 2270 - RNA, 20 nt, Homo sapiens
  source 1..20: mol_type = genomic RNA
taatttcctctgacatgtaa

SEQ ID NO: 2271 - RNA, 20 nt, Homo sapiens
  source 1..20: mol_type = genomic RNA
aatttcctctgacatgtaag

SEQ ID NO: 2272 - RNA, 20 nt, Homo sapiens
  source 1..20: mol_type = genomic RNA
atttcctctgacatgtaaga

SEQ ID NO: 2273 - RNA, 20 nt, Homo sapiens
  source 1..20: mol_type = genomic RNA
tttcctctgacatgtaagac

SEQ ID NO: 2274 - RNA, 20 nt, Homo sapiens
  source 1..20: mol_type = genomic RNA
ttcctctgacatgtaagacg

SEQ ID NO: 2275 - RNA, 20 nt, Homo sapiens
  source 1..20: mol_type = genomic RNA
tcctctgacatgtaagacga

SEQ ID NO: 2276 - RNA, 20 nt, Homo sapiens
  source 1..20: mol_type = genomic RNA
cctctgacatgtaagacgaa

SEQ ID NO: 2277 - RNA, 20 nt, Homo sapiens
  source 1..20: mol_type = genomic RNA
ctctgacatgtaagacgaat

SEQ ID NO: 2278 - RNA, 20 nt, Homo sapiens
  source 1..20: mol_type = genomic RNA
tctgacatgtaagacgaatg

SEQ ID NO: 2279 - RNA, 20 nt, Homo sapiens
  source 1..20: mol_type = genomic RNA
ctgacatgtaagacgaatga

SEQ ID NO: 2280 - RNA, 20 nt, Homo sapiens
  source 1..20: mol_type = genomic RNA
tgacatgtaagacgaatgat

SEQ ID NO: 2281 - RNA, 20 nt, Homo sapiens
  source 1..20: mol_type = genomic RNA
gacatgtaagacgaatgatt

SEQ ID NO: 2282 - RNA, 20 nt, Homo sapiens
  source 1..20: mol_type = genomic RNA
acatgtaagacgaatgattt

SEQ ID NO: 2283 - RNA, 20 nt, Homo sapiens
  source 1..20: mol_type = genomic RNA
catgtaagacgaatgattta

SEQ ID NO: 2284 - RNA, 20 nt, Homo sapiens
  source 1..20: mol_type = genomic RNA
atgtaagacgaatgatttag

SEQ ID NO: 2285 - RNA, 20 nt, Homo sapiens
  source 1..20: mol_type = genomic RNA
tgtaagacgaatgatttagg

SEQ ID NO: 2286 - RNA, 20 nt, Homo sapiens
  source 1..20: mol_type = genomic RNA
gtaagacgaatgatttaggt

SEQ ID NO: 2287 - RNA, 20 nt, Homo sapiens
  source 1..20: mol_type = genomic RNA
taagacgaatgatttaggta

SEQ ID NO: 2288 - RNA, 20 nt, Homo sapiens
  source 1..20: mol_type = genomic RNA
aagacgaatgatttaggtac

SEQ ID NO: 2289 - RNA, 20 nt, Homo sapiens
  source 1..20: mol_type = genomic RNA
agacgaatgatttaggtacg

SEQ ID NO: 2290 - RNA, 20 nt, Homo sapiens
  source 1..20: mol_type = genomic RNA
gacgaatgatttaggtacgt

SEQ ID NO: 2291 - RNA, 20 nt, Homo sapiens
  source 1..20: mol_type = genomic RNA
acgaatgatttaggtacgtc

SEQ ID NO: 2292 - RNA, 20 nt, Homo sapiens
  source 1..20: mol_type = genomic RNA
cgaatgatttaggtacgtca

SEQ ID NO: 2293 - RNA, 20 nt, Homo sapiens
  source 1..20: mol_type = genomic RNA
gaatgatttaggtacgtcaa

SEQ ID NO: 2294 - RNA, 20 nt, Homo sapiens
  source 1..20: mol_type = genomic RNA
aatgatttaggtacgtcaaa

SEQ ID NO: 2295 - RNA, 20 nt, Homo sapiens
  source 1..20: mol_type = genomic RNA
atgatttaggtacgtcaaag

SEQ ID NO: 2296 - RNA, 20 nt, Homo sapiens
  source 1..20: mol_type = genomic RNA
tgatttaggtacgtcaaagc

SEQ ID NO: 2297 - RNA, 20 nt, Homo sapiens
  source 1..20: mol_type = genomic RNA
gatttaggtacgtcaaagca

SEQ ID NO: 2298 - RNA, 20 nt, Homo sapiens
  source 1..20: mol_type = genomic RNA
atttaggtacgtcaaagcag

SEQ ID NO: 2299 - RNA, 20 nt, Homo sapiens
  source 1..20: mol_type = genomic RNA
tttaggtacgtcaaagcagt

SEQ ID NO: 2300 - RNA, 20 nt, Homo sapiens
  source 1..20: mol_type = genomic RNA
ttaggtacgtcaaagcagta

SEQ ID NO: 2301 - RNA, 20 nt, Homo sapiens
  source 1..20: mol_type = genomic RNA
taggtacgtcaaagcagtag

SEQ ID NO: 2302 - RNA, 20 nt, Homo sapiens
  source 1..20: mol_type = genomic RNA
aggtacgtcaaagcagtagt

SEQ ID NO: 2303 - RNA, 20 nt, Homo sapiens
  source 1..20: mol_type = genomic RNA
ggtacgtcaaagcagtagtc

SEQ ID NO: 2304 - RNA, 20 nt, Homo sapiens
  source 1..20: mol_type = genomic RNA
gtacgtcaaagcagtagtca

SEQ ID NO: 2305 - RNA, 20 nt, Homo sapiens
  source 1..20: mol_type = genomic RNA
tacgtcaaagcagtagtcaa

SEQ ID NO: 2306 - RNA, 20 nt, Homo sapiens
  source 1..20: mol_type = genomic RNA
acgtcaaagcagtagtcaag

SEQ ID NO: 2307 - RNA, 20 nt, Homo sapiens
  source 1..20: mol_type = genomic RNA
cgtcaaagcagtagtcaagg

SEQ ID NO: 2308 - RNA, 20 nt, Homo sapiens
  source 1..20: mol_type = genomic RNA
gtcaaagcagtagtcaagga

SEQ ID NO: 2309 - RNA, 20 nt, Homo sapiens
  source 1..20: mol_type = genomic RNA
tcaaagcagtagtcaaggag

SEQ ID NO: 2310 - RNA, 20 nt, Homo sapiens
  source 1..20: mol_type = genomic RNA
caaagcagtagtcaaggagg

SEQ ID NO: 2311 - RNA, 20 nt, Homo sapiens
  source 1..20: mol_type = genomic RNA
aaagcagtagtcaaggagga

SEQ ID NO: 2312 - RNA, 20 nt, Homo sapiens
  source 1..20: mol_type = genomic RNA
aagcagtagtcaaggaggaa

SEQ ID NO: 2313 - RNA, 20 nt, Homo sapiens
  source 1..20: mol_type = genomic RNA
agcagtagtcaaggaggaaa

SEQ ID NO: 2314 - RNA, 20 nt, Homo sapiens
  source 1..20: mol_type = genomic RNA
gcagtagtcaaggaggaaag

SEQ ID NO: 2315 - RNA, 20 nt, Homo sapiens
  source 1..20: mol_type = genomic RNA
cagtagtcaaggaggaaagg

SEQ ID NO: 2316 - RNA, 20 nt, Homo sapiens
  source 1..20: mol_type = genomic RNA
agtagtcaaggaggaaaggg

SEQ ID NO: 2317 - RNA, 20 nt, Homo sapiens
  source 1..20: mol_type = genomic RNA
gtagtcaaggaggaaaggga

SEQ ID NO: 2318 - RNA, 20 nt, Homo sapiens
  source 1..20: mol_type = genomic RNA
tagtcaaggaggaaagggat

SEQ ID NO: 2319 - RNA, 20 nt, Homo sapiens
  source 1..20: mol_type = genomic RNA
agtcaaggaggaaagggata

SEQ ID NO: 2320 - RNA, 20 nt, Homo sapiens
  source 1..20: mol_type = genomic RNA
gtcaaggaggaaagggatag

SEQ ID NO: 2321 - RNA, 20 nt, Homo sapiens
  source 1..20: mol_type = genomic RNA
tcaaggaggaaagggatagt

SEQ ID NO: 2322 - RNA, 20 nt, Homo sapiens
  source 1..20: mol_type = genomic RNA
caaggaggaaagggatagtc

SEQ ID NO: 2323 - RNA, 20 nt, Homo sapiens
  source 1..20: mol_type = genomic RNA
aaggaggaaagggatagtcc

SEQ ID NO: 2324 - RNA, 20 nt, Homo sapiens
  source 1..20: mol_type = genomic RNA
aggaggaaagggatagtcca

SEQ ID NO: 2325 - RNA, 20 nt, Homo sapiens
  source 1..20: mol_type = genomic RNA
ggaggaaagggatagtccaa

SEQ ID NO: 2326 - RNA, 20 nt, Homo sapiens
  source 1..20: mol_type = genomic RNA
gaggaaagggatagtccaaa

SEQ ID NO: 2327 - RNA, 20 nt, Homo sapiens
  source 1..20: mol_type = genomic RNA
aggaaagggatagtccaaag

SEQ ID NO: 2328 - RNA, 20 nt, Homo sapiens
  source 1..20: mol_type = genomic RNA
ggaaagggatagtccaaaga

SEQ ID NO: 2329 - RNA, 20 nt, Homo sapiens
  source 1..20: mol_type = genomic RNA
gaaagggatagtccaaagac

SEQ ID NO: 2330 - RNA, 20 nt, Homo sapiens
  source 1..20: mol_type = genomic RNA
aaagggatagtccaaagact

SEQ ID NO: 2331 - RNA, 20 nt, Homo sapiens
  source 1..20: mol_type = genomic RNA
aagggatagtccaaagactt

SEQ ID NO: 2332 - RNA, 20 nt, Homo sapiens
  source 1..20: mol_type = genomic RNA
agggatagtccaaagactta

SEQ ID NO: 2333 - RNA, 20 nt, Homo sapiens
  source 1..20: mol_type = genomic RNA
gggatagtccaaagacttaa

SEQ ID NO: 2334 - RNA, 20 nt, Homo sapiens
  source 1..20: mol_type = genomic RNA
ggatagtccaaagacttaac

SEQ ID NO: 2335 - RNA, 20 nt, Homo sapiens
  source 1..20: mol_type = genomic RNA
gatagtccaaagacttaact

SEQ ID NO: 2336 - RNA, 20 nt, Homo sapiens
  source 1..20: mol_type = genomic RNA
atagtccaaagacttaactg

SEQ ID NO: 2337 - RNA, 20 nt, Homo sapiens
  source 1..20: mol_type = genomic RNA
tagtccaaagacttaactgg

SEQ ID NO: 2338 - RNA, 20 nt, Homo sapiens
  source 1..20: mol_type = genomic RNA
agtccaaagacttaactggt

SEQ ID NO: 2339 - RNA, 20 nt, Homo sapiens
  source 1..20: mol_type = genomic RNA
gtccaaagacttaactggtt

SEQ ID NO: 2340 - RNA, 20 nt, Homo sapiens
  source 1..20: mol_type = genomic RNA
tccaaagacttaactggttc

SEQ ID NO: 2341 - RNA, 20 nt, Homo sapiens
  source 1..20: mol_type = genomic RNA
ccaaagacttaactggttca

SEQ ID NO: 2342 - RNA, 20 nt, Homo sapiens
  source 1..20: mol_type = genomic RNA
caaagacttaactggttcat

SEQ ID NO: 2343 - RNA, 20 nt, Homo sapiens
  source 1..20: mol_type = genomic RNA
aaagacttaactggttcata

SEQ ID NO: 2344 - RNA, 20 nt, Homo sapiens
  source 1..20: mol_type = genomic RNA
aagacttaactggttcatat

SEQ ID NO: 2345 - RNA, 20 nt, Homo sapiens
  source 1..20: mol_type = genomic RNA
agacttaactggttcatatt

SEQ ID NO: 2346 - RNA, 20 nt, Homo sapiens
  source 1..20: mol_type = genomic RNA
gacttaactggttcatattg

SEQ ID NO: 2347 - RNA, 20 nt, Homo sapiens
  source 1..20: mol_type = genomic RNA
acttaactggttcatattgg

SEQ ID NO: 2348 - RNA, 20 nt, Homo sapiens
  source 1..20: mol_type = genomic RNA
cttaactggttcatattgga

SEQ ID NO: 2349 - RNA, 20 nt, Homo sapiens
  source 1..20: mol_type = genomic RNA
ttaactggttcatattggac

SEQ ID NO: 2350 - RNA, 20 nt, Homo sapiens
  source 1..20: mol_type = genomic RNA
taactggttcatattggact

SEQ ID NO: 2351 - RNA, 20 nt, Homo sapiens
  source 1..20: mol_type = genomic RNA
aactggttcatattggactg

SEQ ID NO: 2352 - RNA, 20 nt, Homo sapiens
  source 1..20: mol_type = genomic RNA
actggttcatattggactga

SEQ ID NO: 2353 - RNA, 20 nt, Homo sapiens
  source 1..20: mol_type = genomic RNA
ctggttcatattggactgat

SEQ ID NO: 2354 - RNA, 20 nt, Homo sapiens
  source 1..20: mol_type = genomic RNA
tggttcatattggactgata

SEQ ID NO: 2355 - RNA, 20 nt, Homo sapiens
  source 1..20: mol_type = genomic RNA
ggttcatattggactgataa

SEQ ID NO: 2356 - RNA, 20 nt, Homo sapiens
  source 1..20: mol_type = genomic RNA
gttcatattggactgataat

SEQ ID NO: 2357 - RNA, 20 nt, Homo sapiens
  source 1..20: mol_type = genomic RNA
ttcatattggactgataatc

SEQ ID NO: 2358 - RNA, 20 nt, Homo sapiens
  source 1..20: mol_type = genomic RNA
tcatattggactgataatct

SEQ ID NO: 2359 - RNA, 20 nt, Homo sapiens
  source 1..20: mol_type = genomic RNA
catattggactgataatctc

SEQ ID NO: 2360 - RNA, 20 nt, Homo sapiens
  source 1..20: mol_type = genomic RNA
atattggactgataatctct

SEQ ID NO: 2361 - RNA, 20 nt, Homo sapiens
  source 1..20: mol_type = genomic RNA
tattggactgataatctctt

SEQ ID NO: 2362 - RNA, 20 nt, Homo sapiens
  source 1..20: mol_type = genomic RNA
attggactgataatctcttt

SEQ ID NO: 2363 - RNA, 20 nt, Homo sapiens
  source 1..20: mol_type = genomic RNA
ttggactgataatctcttta

SEQ ID NO: 2364 - RNA, 20 nt, Homo sapiens
  source 1..20: mol_type = genomic RNA
tggactgataatctctttaa

SEQ ID NO: 2365 - RNA, 20 nt, Homo sapiens
  source 1..20: mol_type = genomic RNA
ggactgataatctctttaaa

SEQ ID NO: 2366 - RNA, 20 nt, Homo sapiens
  source 1..20: mol_type = genomic RNA
gactgataatctctttaaat

SEQ ID NO: 2367 - RNA, 20 nt, Homo sapiens
  source 1..20: mol_type = genomic RNA
actgataatctctttaaatg

SEQ ID NO: 2368 - RNA, 20 nt, Homo sapiens
  source 1..20: mol_type = genomic RNA
ctgataatctctttaaatgg

SEQ ID NO: 2369 - RNA, 20 nt, Homo sapiens
  source 1..20: mol_type = genomic RNA
tgataatctctttaaatggc

SEQ ID NO: 2370 - RNA, 20 nt, Homo sapiens
  source 1..20: mol_type = genomic RNA
gataatctctttaaatggct

SEQ ID NO: 2371 - RNA, 20 nt, Homo sapiens
  source 1..20: mol_type = genomic RNA
ataatctctttaaatggctt

SEQ ID NO: 2372 - RNA, 20 nt, Homo sapiens
  source 1..20: mol_type = genomic RNA
taatctctttaaatggcttt

SEQ ID NO: 2373 - RNA, 20 nt, Homo sapiens
  source 1..20: mol_type = genomic RNA
aatctctttaaatggcttta

SEQ ID NO: 2374 - RNA, 20 nt, Homo sapiens
  source 1..20: mol_type = genomic RNA
atctctttaaatggctttat

SEQ ID NO: 2375 - RNA, 20 nt, Homo sapiens
  source 1..20: mol_type = genomic RNA
tctctttaaatggctttatg

SEQ ID NO: 2376 - RNA, 20 nt, Homo sapiens
  source 1..20: mol_type = genomic RNA
ctctttaaatggctttatgc

SEQ ID NO: 2377 - RNA, 20 nt, Homo sapiens
  source 1..20: mol_type = genomic RNA
tctttaaatggctttatgct

SEQ ID NO: 2378 - RNA, 20 nt, Homo sapiens
  source 1..20: mol_type = genomic RNA
ctttaaatggctttatgcta

SEQ ID NO: 2379 - RNA, 20 nt, Homo sapiens
  source 1..20: mol_type = genomic RNA
tttaaatggctttatgctag

SEQ ID NO: 2380 - RNA, 20 nt, Homo sapiens
  source 1..20: mol_type = genomic RNA
ttaaatggctttatgctagt

SEQ ID NO: 2381 - RNA, 20 nt, Homo sapiens
  source 1..20: mol_type = genomic RNA
taaatggctttatgctagtt

SEQ ID NO: 2382 - RNA, 20 nt, Homo sapiens
  source 1..20: mol_type = genomic RNA
aaatggctttatgctagttt

SEQ ID NO: 2383 - RNA, 20 nt, Homo sapiens
  source 1..20: mol_type = genomic RNA
aatggctttatgctagtttg

SEQ ID NO: 2384 - RNA, 20 nt, Homo sapiens
  source 1..20: mol_type = genomic RNA
atggctttatgctagtttga

SEQ ID NO: 2385 - RNA, 20 nt, Homo sapiens
  source 1..20: mol_type = genomic RNA
tggctttatgctagtttgac

SEQ ID NO: 2386 - RNA, 20 nt, Homo sapiens
  source 1..20: mol_type = genomic RNA
ggctttatgctagtttgacc

SEQ ID NO: 2387 - RNA, 20 nt, Homo sapiens
  source 1..20: mol_type = genomic RNA
gctttatgctagtttgacct

SEQ ID NO: 2388 - RNA, 20 nt, Homo sapiens
  source 1..20: mol_type = genomic RNA
ctttatgctagtttgacctc

SEQ ID NO: 2389 - RNA, 20 nt, Homo sapiens
  source 1..20: mol_type = genomic RNA
tttatgctagtttgacctca

SEQ ID NO: 2390 - RNA, 20 nt, Homo sapiens
  source 1..20: mol_type = genomic RNA
ttatgctagtttgacctcat

SEQ ID NO: 2391 - RNA, 20 nt, Homo sapiens
  source 1..20: mol_type = genomic RNA
tatgctagtttgacctcatt

SEQ ID NO: 2392 - RNA, 20 nt, Homo sapiens
  source 1..20: mol_type = genomic RNA
atgctagtttgacctcattt

SEQ ID NO: 2393 - RNA, 20 nt, Homo sapiens
  source 1..20: mol_type = genomic RNA
tgctagtttgacctcatttg

SEQ ID NO: 2394 - RNA, 20 nt, Homo sapiens
  source 1..20: mol_type = genomic RNA
gctagtttgacctcatttgt

SEQ ID NO: 2395 - RNA, 20 nt, Homo sapiens
  source 1..20: mol_type = genomic RNA
ctagtttgacctcatttgta

SEQ ID NO: 2396 - RNA, 20 nt, Homo sapiens
  source 1..20: mol_type = genomic RNA
tagtttgacctcatttgtaa

SEQ ID NO: 2397 - RNA, 20 nt, Homo sapiens
  source 1..20: mol_type = genomic RNA
agtttgacctcatttgtaaa

SEQ ID NO: 2398 - RNA, 20 nt, Homo sapiens
  source 1..20: mol_type = genomic RNA
gtttgacctcatttgtaaaa

SEQ ID NO: 2399 - RNA, 20 nt, Homo sapiens
  source 1..20: mol_type = genomic RNA
tttgacctcatttgtaaaat

SEQ ID NO: 2400 - RNA, 20 nt, Homo sapiens
  source 1..20: mol_type = genomic RNA
ttgacctcatttgtaaaata

SEQ ID NO: 2401 - RNA, 20 nt, Homo sapiens
  source 1..20: mol_type = genomic RNA
tgacctcatttgtaaaatat

SEQ ID NO: 2402 - RNA, 20 nt, Homo sapiens
  source 1..20: mol_type = genomic RNA
gacctcatttgtaaaatatt

SEQ ID NO: 2403 - RNA, 20 nt, Homo sapiens
  source 1..20: mol_type = genomic RNA
acctcatttgtaaaatattt

SEQ ID NO: 2404 - RNA, 20 nt, Homo sapiens
  source 1..20: mol_type = genomic RNA
cctcatttgtaaaatattta

SEQ ID NO: 2405 - RNA, 20 nt, Homo sapiens
  source 1..20: mol_type = genomic RNA
ctcatttgtaaaatatttat

SEQ ID NO: 2406 - RNA, 20 nt, Homo sapiens
  source 1..20: mol_type = genomic RNA
tcatttgtaaaatatttatg

SEQ ID NO: 2407 - RNA, 20 nt, Homo sapiens
  source 1..20: mol_type = genomic RNA
catttgtaaaatatttatga

SEQ ID NO: 2408 - RNA, 20 nt, Homo sapiens
  source 1..20: mol_type = genomic RNA
atttgtaaaatatttatgag

SEQ ID NO: 2409 - RNA, 20 nt, Homo sapiens
  source 1..20: mol_type = genomic RNA
tttgtaaaatatttatgaga

SEQ ID NO: 2410 - RNA, 20 nt, Homo sapiens
  source 1..20: mol_type = genomic RNA
ttgtaaaatatttatgagaa

SEQ ID NO: 2411 - RNA, 20 nt, Homo sapiens
  source 1..20: mol_type = genomic RNA
tgtaaaatatttatgagaaa

SEQ ID NO: 2412 - RNA, 20 nt, Homo sapiens
  source 1..20: mol_type = genomic RNA
gtaaaatatttatgagaaag

SEQ ID NO: 2413 - RNA, 20 nt, Homo sapiens
  source 1..20: mol_type = genomic RNA
taaaatatttatgagaaagt

SEQ ID NO: 2414 - RNA, 20 nt, Homo sapiens
  source 1..20: mol_type = genomic RNA
aaaatatttatgagaaagtt

SEQ ID NO: 2415 - RNA, 20 nt, Homo sapiens
  source 1..20: mol_type = genomic RNA
aaatatttatgagaaagttc

SEQ ID NO: 2416 - RNA, 20 nt, Homo sapiens
  source 1..20: mol_type = genomic RNA
aatatttatgagaaagttct

SEQ ID NO: 2417 - RNA, 20 nt, Homo sapiens
  source 1..20: mol_type = genomic RNA
atatttatgagaaagttctc

SEQ ID NO: 2418 - RNA, 20 nt, Homo sapiens
  source 1..20: mol_type = genomic RNA
tatttatgagaaagttctca

SEQ ID NO: 2419 - RNA, 20 nt, Homo sapiens
  source 1..20: mol_type = genomic RNA
atttatgagaaagttctcat

SEQ ID NO: 2420 - RNA, 20 nt, Homo sapiens
  source 1..20: mol_type = genomic RNA
tttatgagaaagttctcatt

SEQ ID NO: 2421 - RNA, 20 nt, Homo sapiens
  source 1..20: mol_type = genomic RNA
ttatgagaaagttctcattt

SEQ ID NO: 2422 - RNA, 20 nt, Homo sapiens
  source 1..20: mol_type = genomic RNA
tatgagaaagttctcattta

SEQ ID NO: 2423 - RNA, 20 nt, Homo sapiens
  source 1..20: mol_type = genomic RNA
atgagaaagttctcatttaa

SEQ ID NO: 2424 - RNA, 20 nt, Homo sapiens
  source 1..20: mol_type = genomic RNA
tgagaaagttctcatttaaa

SEQ ID NO: 2425 - RNA, 20 nt, Homo sapiens
  source 1..20: mol_type = genomic RNA
gagaaagttctcatttaaaa

SEQ ID NO: 2426 - RNA, 20 nt, Homo sapiens
  source 1..20: mol_type = genomic RNA
agaaagttctcatttaaaat

SEQ ID NO: 2427 - RNA, 20 nt, Homo sapiens
  source 1..20: mol_type = genomic RNA
gaaagttctcatttaaaatg

SEQ ID NO: 2428 - RNA, 20 nt, Homo sapiens
  source 1..20: mol_type = genomic RNA
aaagttctcatttaaaatga

SEQ ID NO: 2429 - RNA, 20 nt, Homo sapiens
  source 1..20: mol_type = genomic RNA
aagttctcatttaaaatgag

SEQ ID NO: 2430 - RNA, 20 nt, Homo sapiens
  source 1..20: mol_type = genomic RNA
agttctcatttaaaatgaga

SEQ ID NO: 2431 - RNA, 20 nt, Homo sapiens
  source 1..20: mol_type = genomic RNA
gttctcatttaaaatgagat

SEQ ID NO: 2432 - RNA, 20 nt, Homo sapiens
  source 1..20: mol_type = genomic RNA
ttctcatttaaaatgagatc

SEQ ID NO: 2433 - RNA, 20 nt, Homo sapiens
  source 1..20: mol_type = genomic RNA
tctcatttaaaatgagatcg

SEQ ID NO: 2434 - RNA, 20 nt, Homo sapiens
  source 1..20: mol_type = genomic RNA
ctcatttaaaatgagatcgt

SEQ ID NO: 2435 - RNA, 20 nt, Homo sapiens
  source 1..20: mol_type = genomic RNA
tcatttaaaatgagatcgtt

SEQ ID NO: 2436 - RNA, 20 nt, Homo sapiens
  source 1..20: mol_type = genomic RNA
catttaaaatgagatcgttg

SEQ ID NO: 2437 - RNA, 20 nt, Homo sapiens
  source 1..20: mol_type = genomic RNA
atttaaaatgagatcgttgt

SEQ ID NO: 2438 - RNA, 20 nt, Homo sapiens
  source 1..20: mol_type = genomic RNA
tttaaaatgagatcgttgtt

SEQ ID NO: 2439 - RNA, 20 nt, Homo sapiens
  source 1..20: mol_type = genomic RNA
ttaaaatgagatcgttgttt

SEQ ID NO: 2440 - RNA, 20 nt, Homo sapiens
  source 1..20: mol_type = genomic RNA
taaaatgagatcgttgttta

SEQ ID NO: 2441 - RNA, 20 nt, Homo sapiens
  source 1..20: mol_type = genomic RNA
aaaatgagatcgttgtttac

SEQ ID NO: 2442 - RNA, 20 nt, Homo sapiens
  source 1..20: mol_type = genomic RNA
aaatgagatcgttgtttaca

SEQ ID NO: 2443 - RNA, 20 nt, Homo sapiens
  source 1..20: mol_type = genomic RNA
aatgagatcgttgtttacag

SEQ ID NO: 2444 - RNA, 20 nt, Homo sapiens
  source 1..20: mol_type = genomic RNA
atgagatcgttgtttacagt

SEQ ID NO: 2445 - RNA, 20 nt, Homo sapiens
  source 1..20: mol_type = genomic RNA
tgagatcgttgtttacagtg

SEQ ID NO: 2446 - RNA, 20 nt, Homo sapiens
  source 1..20: mol_type = genomic RNA
gagatcgttgtttacagtgt

SEQ ID NO: 2447 - RNA, 20 nt, Homo sapiens
  source 1..20: mol_type = genomic RNA
agatcgttgtttacagtgta

SEQ ID NO: 2448 - RNA, 20 nt, Homo sapiens
  source 1..20: mol_type = genomic RNA
gatcgttgtttacagtgtat

SEQ ID NO: 2449 - RNA, 20 nt, Homo sapiens
  source 1..20: mol_type = genomic RNA
atcgttgtttacagtgtatg

SEQ ID NO: 2450 - RNA, 20 nt, Homo sapiens
  source 1..20: mol_type = genomic RNA
tcgttgtttacagtgtatgt

SEQ ID NO: 2451 - RNA, 20 nt, Homo sapiens
  source 1..20: mol_type = genomic RNA
cgttgtttacagtgtatgta

SEQ ID NO: 2452 - RNA, 20 nt, Homo sapiens
  source 1..20: mol_type = genomic RNA
gttgtttacagtgtatgtac

SEQ ID NO: 2453 - RNA, 20 nt, Homo sapiens
  source 1..20: mol_type = genomic RNA
ttgtttacagtgtatgtact

SEQ ID NO: 2454 - RNA, 20 nt, Homo sapiens
  source 1..20: mol_type = genomic RNA
tgtttacagtgtatgtacta

SEQ ID NO: 2455 - RNA, 20 nt, Homo sapiens
  source 1..20: mol_type = genomic RNA
gtttacagtgtatgtactaa

SEQ ID NO: 2456 - RNA, 20 nt, Homo sapiens
  source 1..20: mol_type = genomic RNA
tttacagtgtatgtactaag

SEQ ID NO: 2457 - RNA, 20 nt, Homo sapiens
  source 1..20: mol_type = genomic RNA
ttacagtgtatgtactaagc

SEQ ID NO: 2458 - RNA, 20 nt, Homo sapiens
  source 1..20: mol_type = genomic RNA
tacagtgtatgtactaagca

SEQ ID NO: 2459 - RNA, 20 nt, Homo sapiens
  source 1..20: mol_type = genomic RNA
acagtgtatgtactaagcag

SEQ ID NO: 2460 - RNA, 20 nt, Homo sapiens
  source 1..20: mol_type = genomic RNA
cagtgtatgtactaagcagt

SEQ ID NO: 2461 - RNA, 20 nt, Homo sapiens
  source 1..20: mol_type = genomic RNA
agtgtatgtactaagcagta

SEQ ID NO: 2462 - RNA, 20 nt, Homo sapiens
  source 1..20: mol_type = genomic RNA
gtgtatgtactaagcagtaa

SEQ ID NO: 2463 - RNA, 20 nt, Homo sapiens
  source 1..20: mol_type = genomic RNA
tgtatgtactaagcagtaag

SEQ ID NO: 2464 - RNA, 20 nt, Homo sapiens
  source 1..20: mol_type = genomic RNA
gtatgtactaagcagtaagc

SEQ ID NO: 2465 - RNA, 20 nt, Homo sapiens
  source 1..20: mol_type = genomic RNA
tatgtactaagcagtaagct

SEQ ID NO: 2466 - RNA, 20 nt, Homo sapiens
  source 1..20: mol_type = genomic RNA
atgtactaagcagtaagcta

SEQ ID NO: 2467 - RNA, 20 nt, Homo sapiens
  source 1..20: mol_type = genomic RNA
tgtactaagcagtaagctat

SEQ ID NO: 2468 - RNA, 20 nt, Homo sapiens
  source 1..20: mol_type = genomic RNA
gtactaagcagtaagctatc

SEQ ID NO: 2469 - RNA, 20 nt, Homo sapiens
  source 1..20: mol_type = genomic RNA
tactaagcagtaagctatct

SEQ ID NO: 2470 - RNA, 20 nt, Homo sapiens
  source 1..20: mol_type = genomic RNA
actaagcagtaagctatctt

SEQ ID NO: 2471 - RNA, 20 nt, Homo sapiens
  source 1..20: mol_type = genomic RNA
ctaagcagtaagctatcttc

SEQ ID NO: 2472 - RNA, 20 nt, Homo sapiens
  source 1..20: mol_type = genomic RNA
taagcagtaagctatcttca

SEQ ID NO: 2473 - RNA, 20 nt, Homo sapiens
  source 1..20: mol_type = genomic RNA
aagcagtaagctatcttcaa

SEQ ID NO: 2474 - RNA, 20 nt, Homo sapiens
  source 1..20: mol_type = genomic RNA
agcagtaagctatcttcaaa

SEQ ID NO: 2475 - RNA, 20 nt, Homo sapiens
  source 1..20: mol_type = genomic RNA
gcagtaagctatcttcaaat

SEQ ID NO: 2476 - RNA, 20 nt, Homo sapiens
  source 1..20: mol_type = genomic RNA
cagtaagctatcttcaaatg

SEQ ID NO: 2477 - RNA, 20 nt, Homo sapiens
  source 1..20: mol_type = genomic RNA
agtaagctatcttcaaatgt

SEQ ID NO: 2478 - RNA, 20 nt, Homo sapiens
  source 1..20: mol_type = genomic RNA
gtaagctatcttcaaatgtc

SEQ ID NO: 2479 - RNA, 20 nt, Homo sapiens
  source 1..20: mol_type = genomic RNA
taagctatcttcaaatgtct

SEQ ID NO: 2480 - RNA, 20 nt, Homo sapiens
  source 1..20: mol_type = genomic RNA
aagctatcttcaaatgtcta

SEQ ID NO: 2481 - RNA, 20 nt, Homo sapiens
  source 1..20: mol_type = genomic RNA
agctatcttcaaatgtctaa

SEQ ID NO: 2482 - RNA, 20 nt, Homo sapiens
  source 1..20: mol_type = genomic RNA
gctatcttcaaatgtctaag

SEQ ID NO: 2483 - RNA, 20 nt, Homo sapiens
  source 1..20: mol_type = genomic RNA
ctatcttcaaatgtctaagg

SEQ ID NO: 2484 - RNA, 20 nt, Homo sapiens
  source 1..20: mol_type = genomic RNA
tatcttcaaatgtctaaggt

SEQ ID NO: 2485 - RNA, 20 nt, Homo sapiens
  source 1..20: mol_type = genomic RNA
atcttcaaatgtctaaggta

SEQ ID NO: 2486 - RNA, 20 nt, Homo sapiens
  source 1..20: mol_type = genomic RNA
tcttcaaatgtctaaggtag

SEQ ID NO: 2487 - RNA, 20 nt, Homo sapiens
  source 1..20: mol_type = genomic RNA
cttcaaatgtctaaggtagt

SEQ ID NO: 2488 - RNA, 20 nt, Homo sapiens
  source 1..20: mol_type = genomic RNA
ttcaaatgtctaaggtagta

SEQ ID NO: 2489 - RNA, 20 nt, Homo sapiens
  source 1..20: mol_type = genomic RNA
tcaaatgtctaaggtagtaa

SEQ ID NO: 2490 - RNA, 20 nt, Homo sapiens
  source 1..20: mol_type = genomic RNA
caaatgtctaaggtagtaac

SEQ ID NO: 2491 - RNA, 20 nt, Homo sapiens
  source 1..20: mol_type = genomic RNA
aaatgtctaaggtagtaact

SEQ ID NO: 2492 - RNA, 20 nt, Homo sapiens
  source 1..20: mol_type = genomic RNA
aatgtctaaggtagtaactt

SEQ ID NO: 2493 - RNA, 20 nt, Homo sapiens
  source 1..20: mol_type = genomic RNA
atgtctaaggtagtaacttt

SEQ ID NO: 2494 - RNA, 20 nt, Homo sapiens
  source 1..20: mol_type = genomic RNA
tgtctaaggtagtaactttc

SEQ ID NO: 2495 - RNA, 20 nt, Homo sapiens
  source 1..20: mol_type = genomic RNA
gtctaaggtagtaactttcc

SEQ ID NO: 2496 - RNA, 20 nt, Homo sapiens
  source 1..20: mol_type = genomic RNA
tctaaggtagtaactttcca

SEQ ID NO: 2497 - RNA, 20 nt, Homo sapiens
  source 1..20: mol_type = genomic RNA
ctaaggtagtaactttccat

SEQ ID NO: 2498 - RNA, 20 nt, Homo sapiens
  source 1..20: mol_type = genomic RNA
taaggtagtaactttccata

SEQ ID NO: 2499 - RNA, 20 nt, Homo sapiens
  source 1..20: mol_type = genomic RNA
aaggtagtaactttccatag

SEQ ID NO: 2500 - RNA, 20 nt, Homo sapiens
  source 1..20: mol_type = genomic RNA
aggtagtaactttccatagg

SEQ ID NO: 2501 - RNA, 20 nt, Homo sapiens
  source 1..20: mol_type = genomic RNA
ggtagtaactttccataggg

SEQ ID NO: 2502 - RNA, 20 nt, Homo sapiens
  source 1..20: mol_type = genomic RNA
gtagtaactttccatagggc

SEQ ID NO: 2503 - RNA, 20 nt, Homo sapiens
  source 1..20: mol_type = genomic RNA
tagtaactttccatagggcc

SEQ ID NO: 2504 - RNA, 20 nt, Homo sapiens
  source 1..20: mol_type = genomic RNA
agtaactttccatagggcct

SEQ ID NO: 2505 - RNA, 20 nt, Homo sapiens
  source 1..20: mol_type = genomic RNA
gtaactttccatagggcctc

SEQ ID NO: 2506 - RNA, 20 nt, Homo sapiens
  source 1..20: mol_type = genomic RNA
taactttccatagggcctcc

SEQ ID NO: 2507 - RNA, 20 nt, Homo sapiens
  source 1..20: mol_type = genomic RNA
aactttccatagggcctcct

SEQ ID NO: 2508 - RNA, 20 nt, Homo sapiens
  source 1..20: mol_type = genomic RNA
actttccatagggcctcctt

SEQ ID NO: 2509 - RNA, 20 nt, Homo sapiens
  source 1..20: mol_type = genomic RNA
ctttccatagggcctcctta

SEQ ID NO: 2510 - RNA, 20 nt, Homo sapiens
  source 1..20: mol_type = genomic RNA
tttccatagggcctccttag

SEQ ID NO: 2511 - RNA, 20 nt, Homo sapiens
  source 1..20: mol_type = genomic RNA
ttccatagggcctccttaga

SEQ ID NO: 2512 - RNA, 20 nt, Homo sapiens
  source 1..20: mol_type = genomic RNA
tccatagggcctccttagat

SEQ ID NO: 2513 - RNA, 20 nt, Homo sapiens
  source 1..20: mol_type = genomic RNA
ccatagggcctccttagatc

SEQ ID NO: 2514 - RNA, 20 nt, Homo sapiens
  source 1..20: mol_type = genomic RNA
catagggcctccttagatcc

SEQ ID NO: 2515 - RNA, 20 nt, Homo sapiens
  source 1..20: mol_type = genomic RNA
atagggcctccttagatccc

SEQ ID NO: 2516 - RNA, 20 nt, Homo sapiens
  source 1..20: mol_type = genomic RNA
tagggcctccttagatccct

SEQ ID NO: 2517 - RNA, 20 nt, Homo sapiens
  source 1..20: mol_type = genomic RNA
agggcctccttagatcccta

SEQ ID NO: 2518 - RNA, 20 nt, Homo sapiens
  source 1..20: mol_type = genomic RNA
gggcctccttagatccctaa

SEQ ID NO: 2519 - RNA, 20 nt, Homo sapiens
  source 1..20: mol_type = genomic RNA
ggcctccttagatccctaag

SEQ ID NO: 2520 - RNA, 20 nt, Homo sapiens
  source 1..20: mol_type = genomic RNA
gcctccttagatccctaaga

SEQ ID NO: 2521 - RNA, 20 nt, Homo sapiens
  source 1..20: mol_type = genomic RNA
cctccttagatccctaagat

SEQ ID NO: 2522 - RNA, 20 nt, Homo sapiens
  source 1..20: mol_type = genomic RNA
ctccttagatccctaagatg

SEQ ID NO: 2523 - RNA, 20 nt, Homo sapiens
  source 1..20: mol_type = genomic RNA
tccttagatccctaagatgg

SEQ ID NO: 2524 - RNA, 20 nt, Homo sapiens
  source 1..20: mol_type = genomic RNA
ccttagatccctaagatggc

SEQ ID NO: 2525 - RNA, 20 nt, Homo sapiens
  source 1..20: mol_type = genomic RNA
cttagatccctaagatggct

SEQ ID NO: 2526 - RNA, 20 nt, Homo sapiens
  source 1..20: mol_type = genomic RNA
ttagatccctaagatggctt

SEQ ID NO: 2527 - RNA, 20 nt, Homo sapiens
  source 1..20: mol_type = genomic RNA
tagatccctaagatggcttt

SEQ ID NO: 2528 - RNA, 20 nt, Homo sapiens
  source 1..20: mol_type = genomic RNA
agatccctaagatggctttt

SEQ ID NO: 2529 - RNA, 20 nt, Homo sapiens
  source 1..20: mol_type = genomic RNA
gatccctaagatggcttttt

SEQ ID NO: 2530 - RNA, 20 nt, Homo sapiens
  source 1..20: mol_type = genomic RNA
atccctaagatggctttttc

SEQ ID NO: 2531 - RNA, 20 nt, Homo sapiens
  source 1..20: mol_type = genomic RNA
tccctaagatggctttttct

SEQ ID NO: 2532 - RNA, 20 nt, Homo sapiens
  source 1..20: mol_type = genomic RNA
ccctaagatggctttttctc

SEQ ID NO: 2533 - RNA, 20 nt, Homo sapiens
  source 1..20: mol_type = genomic RNA
cctaagatggctttttctcc

SEQ ID NO: 2534 - RNA, 20 nt, Homo sapiens
  source 1..20: mol_type = genomic RNA
ctaagatggctttttctcct

SEQ ID NO: 2535 - RNA, 20 nt, Homo sapiens
  source 1..20: mol_type = genomic RNA
taagatggctttttctcctt

SEQ ID NO: 2536 - RNA, 20 nt, Homo sapiens
  source 1..20: mol_type = genomic RNA
aagatggctttttctccttg

SEQ ID NO: 2537 - RNA, 20 nt, Homo sapiens
  source 1..20: mol_type = genomic RNA
agatggctttttctccttgg

SEQ ID NO: 2538 - RNA, 20 nt, Homo sapiens
  source 1..20: mol_type = genomic RNA
gatggctttttctccttggt

SEQ ID NO: 2539 - RNA, 20 nt, Homo sapiens
  source 1..20: mol_type = genomic RNA
atggctttttctccttggta

SEQ ID NO: 2540 - RNA, 20 nt, Homo sapiens
  source 1..20: mol_type = genomic RNA
tggctttttctccttggtat

SEQ ID NO: 2541 - RNA, 20 nt, Homo sapiens
  source 1..20: mol_type = genomic RNA
ggctttttctccttggtatt

SEQ ID NO: 2542 - RNA, 20 nt, Homo sapiens
  source 1..20: mol_type = genomic RNA
gctttttctccttggtattt

SEQ ID NO: 2543 - RNA, 20 nt, Homo sapiens
  source 1..20: mol_type = genomic RNA
ctttttctccttggtatttc

SEQ ID NO: 2544 - RNA, 20 nt, Homo sapiens
  source 1..20: mol_type = genomic RNA
tttttctccttggtatttct

SEQ ID NO: 2545 - RNA, 20 nt, Homo sapiens
  source 1..20: mol_type = genomic RNA
ttttctccttggtatttctg

SEQ ID NO: 2546 - RNA, 20 nt, Homo sapiens
  source 1..20: mol_type = genomic RNA
tttctccttggtatttctgg

SEQ ID NO: 2547 - RNA, 20 nt, Homo sapiens
  source 1..20: mol_type = genomic RNA
ttctccttggtatttctggg

SEQ ID NO: 2548 - RNA, 20 nt, Homo sapiens
  source 1..20: mol_type = genomic RNA
tctccttggtatttctgggt

SEQ ID NO: 2549 - RNA, 20 nt, Homo sapiens
  source 1..20: mol_type = genomic RNA
ctccttggtatttctgggtc

SEQ ID NO: 2550 - RNA, 20 nt, Homo sapiens
  source 1..20: mol_type = genomic RNA
tccttggtatttctgggtct

SEQ ID NO: 2551 - RNA, 20 nt, Homo sapiens
  source 1..20: mol_type = genomic RNA
ccttggtatttctgggtctt

SEQ ID NO: 2552 - RNA, 20 nt, Homo sapiens
  source 1..20: mol_type = genomic RNA
cttggtatttctgggtcttt

SEQ ID NO: 2553 - RNA, 20 nt, Homo sapiens
  source 1..20: mol_type = genomic RNA
ttggtatttctgggtctttc

SEQ ID NO: 2554 - RNA, 20 nt, Homo sapiens
  source 1..20: mol_type = genomic RNA
tggtatttctgggtctttct

SEQ ID NO: 2555 - RNA, 20 nt, Homo sapiens
  source 1..20: mol_type = genomic RNA
ggtatttctgggtctttctg

SEQ ID NO: 2556 - RNA, 20 nt, Homo sapiens
  source 1..20: mol_type = genomic RNA
gtatttctgggtctttctga

SEQ ID NO: 2557 - RNA, 20 nt, Homo sapiens
  source 1..20: mol_type = genomic RNA
tatttctgggtctttctgac

SEQ ID NO: 2558 - RNA, 20 nt, Homo sapiens
  source 1..20: mol_type = genomic RNA
atttctgggtctttctgaca

SEQ ID NO: 2559 - RNA, 20 nt, Homo sapiens
  source 1..20: mol_type = genomic RNA
tttctgggtctttctgacat

SEQ ID NO: 2560 - RNA, 20 nt, Homo sapiens
  source 1..20: mol_type = genomic RNA
ttctgggtctttctgacatc

SEQ ID NO: 2561 - RNA, 20 nt, Homo sapiens
  source 1..20: mol_type = genomic RNA
tctgggtctttctgacatca

SEQ ID NO: 2562 - RNA, 20 nt, Homo sapiens
  source 1..20: mol_type = genomic RNA
ctgggtctttctgacatcag

SEQ ID NO: 2563 - RNA, 20 nt, Homo sapiens
  source 1..20: mol_type = genomic RNA
tgggtctttctgacatcagc

SEQ ID NO: 2564 - RNA, 20 nt, Homo sapiens
  source 1..20: mol_type = genomic RNA
gggtctttctgacatcagca

SEQ ID NO: 2565 - RNA, 20 nt, Homo sapiens
  source 1..20: mol_type = genomic RNA
ggtctttctgacatcagcag

SEQ ID NO: 2566 - RNA, 20 nt, Homo sapiens
  source 1..20: mol_type = genomic RNA
gtctttctgacatcagcaga

SEQ ID NO: 2567 - RNA, 20 nt, Homo sapiens
  source 1..20: mol_type = genomic RNA
tctttctgacatcagcagag

SEQ ID NO: 2568 - RNA, 20 nt, Homo sapiens
  source 1..20: mol_type = genomic RNA
ctttctgacatcagcagaga

SEQ ID NO: 2569 - RNA, 20 nt, Homo sapiens
  source 1..20: mol_type = genomic RNA
tttctgacatcagcagagaa

SEQ ID NO: 2570 - RNA, 20 nt, Homo sapiens
  source 1..20: mol_type = genomic RNA
ttctgacatcagcagagaac

SEQ ID NO: 2571 - RNA, 20 nt, Homo sapiens
  source 1..20: mol_type = genomic RNA
tctgacatcagcagagaact

SEQ ID NO: 2572 - RNA, 20 nt, Homo sapiens
  source 1..20: mol_type = genomic RNA
ctgacatcagcagagaactg

SEQ ID NO: 2573 - RNA, 20 nt, Homo sapiens
  source 1..20: mol_type = genomic RNA
tgacatcagcagagaactgg

SEQ ID NO: 2574 - RNA, 20 nt, Homo sapiens
  source 1..20: mol_type = genomic RNA
gacatcagcagagaactgga

SEQ ID NO: 2575 - RNA, 20 nt, Homo sapiens
  source 1..20: mol_type = genomic RNA
acatcagcagagaactggaa

SEQ ID NO: 2576 - RNA, 20 nt, Homo sapiens
  source 1..20: mol_type = genomic RNA
catcagcagagaactggaaa

SEQ ID NO: 2577 - RNA, 20 nt, Homo sapiens
  source 1..20: mol_type = genomic RNA
atcagcagagaactggaaag

SEQ ID NO: 2578 - RNA, 20 nt, Homo sapiens
  source 1..20: mol_type = genomic RNA
tcagcagagaactggaaaga

SEQ ID NO: 2579 - RNA, 20 nt, Homo sapiens
  source 1..20: mol_type = genomic RNA
cagcagagaactggaaagac

SEQ ID NO: 2580 - RNA, 20 nt, Homo sapiens
  source 1..20: mol_type = genomic RNA
agcagagaactggaaagaca

SEQ ID NO: 2581 - RNA, 20 nt, Homo sapiens
  source 1..20: mol_type = genomic RNA
gcagagaactggaaagacat

SEQ ID NO: 2582 - RNA, 20 nt, Homo sapiens
  source 1..20: mol_type = genomic RNA
cagagaactggaaagacata

SEQ ID NO: 2583 - RNA, 20 nt, Homo sapiens
  source 1..20: mol_type = genomic RNA
agagaactggaaagacatag

SEQ ID NO: 2584 - RNA, 20 nt, Homo sapiens
  source 1..20: mol_type = genomic RNA
gagaactggaaagacatagc

SEQ ID NO: 2585 - RNA, 20 nt, Homo sapiens
  source 1..20: mol_type = genomic RNA
agaactggaaagacatagcc

SEQ ID NO: 2586 - RNA, 20 nt, Homo sapiens
  source 1..20: mol_type = genomic RNA
gaactggaaagacatagcca

SEQ ID NO: 2587 - RNA, 20 nt, Homo sapiens
  source 1..20: mol_type = genomic RNA
aactggaaagacatagccaa

SEQ ID NO: 2588 - RNA, 20 nt, Homo sapiens
  source 1..20: mol_type = genomic RNA
actggaaagacatagccaac

SEQ ID NO: 2589 - RNA, 20 nt, Homo sapiens
  source 1..20: mol_type = genomic RNA
ctggaaagacatagccaact

SEQ ID NO: 2590 - RNA, 20 nt, Homo sapiens
  source 1..20: mol_type = genomic RNA
tggaaagacatagccaactg

SEQ ID NO: 2591 - RNA, 20 nt, Homo sapiens
  source 1..20: mol_type = genomic RNA
ggaaagacatagccaactgc

SEQ ID NO: 2592 - RNA, 20 nt, Homo sapiens
  source 1..20: mol_type = genomic RNA
gaaagacatagccaactgct

SEQ ID NO: 2593 - RNA, 20 nt, Homo sapiens
  source 1..20: mol_type = genomic RNA
aaagacatagccaactgctg

SEQ ID NO: 2594 - RNA, 20 nt, Homo sapiens
  source 1..20: mol_type = genomic RNA
aagacatagccaactgctgt

SEQ ID NO: 2595 - RNA, 20 nt, Homo sapiens
  source 1..20: mol_type = genomic RNA
agacatagccaactgctgtt

SEQ ID NO: 2596 - RNA, 20 nt, Homo sapiens
  source 1..20: mol_type = genomic RNA
gacatagccaactgctgttc

SEQ ID NO: 2597 - RNA, 20 nt, Homo sapiens
  source 1..20: mol_type = genomic RNA
acatagccaactgctgttca

SEQ ID NO: 2598 - RNA, 20 nt, Homo sapiens
  source 1..20: mol_type = genomic RNA
catagccaactgctgttcat

SEQ ID NO: 2599 - RNA, 20 nt, Homo sapiens
  source 1..20: mol_type = genomic RNA
atagccaactgctgttcatg

SEQ ID NO: 2600 - RNA, 20 nt, Homo sapiens
  source 1..20: mol_type = genomic RNA
tagccaactgctgttcatgt

SEQ ID NO: 2601 - RNA, 20 nt, Homo sapiens
  source 1..20: mol_type = genomic RNA
agccaactgctgttcatgtt

SEQ ID NO: 2602 - RNA, 20 nt, Homo sapiens
  source 1..20: mol_type = genomic RNA
gccaactgctgttcatgtta

SEQ ID NO: 2603 - RNA, 20 nt, Homo sapiens
  source 1..20: mol_type = genomic RNA
ccaactgctgttcatgttac

SEQ ID NO: 2604 - RNA, 20 nt, Homo sapiens
  source 1..20: mol_type = genomic RNA
caactgctgttcatgttact

SEQ ID NO: 2605 - RNA, 20 nt, Homo sapiens
  source 1..20: mol_type = genomic RNA
aactgctgttcatgttactc

SEQ ID NO: 2606 - RNA, 20 nt, Homo sapiens
  source 1..20: mol_type = genomic RNA
actgctgttcatgttactca

SEQ ID NO: 2607 - RNA, 20 nt, Homo sapiens
  source 1..20: mol_type = genomic RNA
ctgctgttcatgttactcat

SEQ ID NO: 2608 - RNA, 20 nt, Homo sapiens
  source 1..20: mol_type = genomic RNA
tgctgttcatgttactcatg

SEQ ID NO: 2609 - RNA, 20 nt, Homo sapiens
  source 1..20: mol_type = genomic RNA
gctgttcatgttactcatga

SEQ ID NO: 2610 - RNA, 20 nt, Homo sapiens
  source 1..20: mol_type = genomic RNA
ctgttcatgttactcatgac

SEQ ID NO: 2611 - RNA, 20 nt, Homo sapiens
  source 1..20: mol_type = genomic RNA
tgttcatgttactcatgact

SEQ ID NO: 2612 - RNA, 20 nt, Homo sapiens
  source 1..20: mol_type = genomic RNA
gttcatgttactcatgactc

SEQ ID NO: 2613 - RNA, 20 nt, Homo sapiens
  source 1..20: mol_type = genomic RNA
ttcatgttactcatgactcc

SEQ ID NO: 2614 - RNA, 20 nt, Homo sapiens
  source 1..20: mol_type = genomic RNA
tcatgttactcatgactcct

SEQ ID NO: 2615 - RNA, 20 nt, Homo sapiens
  source 1..20: mol_type = genomic RNA
catgttactcatgactcctt

SEQ ID NO: 2616 - RNA, 20 nt, Homo sapiens
  source 1..20: mol_type = genomic RNA
atgttactcatgactccttt

SEQ ID NO: 2617 - RNA, 20 nt, Homo sapiens
  source 1..20: mol_type = genomic RNA
tgttactcatgactcctttc

SEQ ID NO: 2618 - RNA, 20 nt, Homo sapiens
  source 1..20: mol_type = genomic RNA
gttactcatgactcctttct

SEQ ID NO: 2619 - RNA, 20 nt, Homo sapiens
  source 1..20: mol_type = genomic RNA
ttactcatgactcctttctc

SEQ ID NO: 2620 - RNA, 20 nt, Homo sapiens
  source 1..20: mol_type = genomic RNA
tactcatgactcctttctct

SEQ ID NO: 2621 - RNA, 20 nt, Homo sapiens
  source 1..20: mol_type = genomic RNA
actcatgactcctttctcta

SEQ ID NO: 2622 - RNA, 20 nt, Homo sapiens
  source 1..20: mol_type = genomic RNA
ctcatgactcctttctctaa

SEQ ID NO: 2623 - RNA, 20 nt, Homo sapiens
  source 1..20: mol_type = genomic RNA
tcatgactcctttctctaaa

SEQ ID NO: 2624 - RNA, 20 nt, Homo sapiens
  source 1..20: mol_type = genomic RNA
catgactcctttctctaaaa

SEQ ID NO: 2625 - RNA, 20 nt, Homo sapiens
  source 1..20: mol_type = genomic RNA
atgactcctttctctaaaac

SEQ ID NO: 2626 - RNA, 20 nt, Homo sapiens
  source 1..20: mol_type = genomic RNA
tgactcctttctctaaaact

SEQ ID NO: 2627 - RNA, 20 nt, Homo sapiens
  source 1..20: mol_type = genomic RNA
gactcctttctctaaaactg

SEQ ID NO: 2628 - RNA, 20 nt, Homo sapiens
  source 1..20: mol_type = genomic RNA
actcctttctctaaaactgc

SEQ ID NO: 2629 - RNA, 20 nt, Homo sapiens
  source 1..20: mol_type = genomic RNA
ctcctttctctaaaactgcc

SEQ ID NO: 2630 - RNA, 20 nt, Homo sapiens
  source 1..20: mol_type = genomic RNA
tcctttctctaaaactgcct

SEQ ID NO: 2631 - RNA, 20 nt, Homo sapiens
  source 1..20: mol_type = genomic RNA
cctttctctaaaactgcctt

SEQ ID NO: 2632 - RNA, 20 nt, Homo sapiens
  source 1..20: mol_type = genomic RNA
ctttctctaaaactgccttc

SEQ ID NO: 2633 - RNA, 20 nt, Homo sapiens
  source 1..20: mol_type = genomic RNA
tttctctaaaactgccttcc

SEQ ID NO: 2634 - RNA, 20 nt, Homo sapiens
  source 1..20: mol_type = genomic RNA
ttctctaaaactgccttcca

SEQ ID NO: 2635 - RNA, 20 nt, Homo sapiens
  source 1..20: mol_type = genomic RNA
tctctaaaactgccttccac

SEQ ID NO: 2636 - RNA, 20 nt, Homo sapiens
  source 1..20: mol_type = genomic RNA
ctctaaaactgccttccaca

SEQ ID NO: 2637 - RNA, 20 nt, Homo sapiens
  source 1..20: mol_type = genomic RNA
tctaaaactgccttccacaa

SEQ ID NO: 2638 - RNA, 20 nt, Homo sapiens
  source 1..20: mol_type = genomic RNA
ctaaaactgccttccacaat

SEQ ID NO: 2639 - RNA, 20 nt, Homo sapiens
  source 1..20: mol_type = genomic RNA
taaaactgccttccacaatt

SEQ ID NO: 2640 - RNA, 20 nt, Homo sapiens
  source 1..20: mol_type = genomic RNA
aaaactgccttccacaattc

SEQ ID NO: 2641 - RNA, 20 nt, Homo sapiens
  source 1..20: mol_type = genomic RNA
aaactgccttccacaattca

SEQ ID NO: 2642 - RNA, 20 nt, Homo sapiens
  source 1..20: mol_type = genomic RNA
aactgccttccacaattcac

SEQ ID NO: 2643 - RNA, 20 nt, Homo sapiens
  source 1..20: mol_type = genomic RNA
actgccttccacaattcact

SEQ ID NO: 2644 - RNA, 20 nt, Homo sapiens
  source 1..20: mol_type = genomic RNA
ctgccttccacaattcacta

SEQ ID NO: 2645 - RNA, 20 nt, Homo sapiens
  source 1..20: mol_type = genomic RNA
tgccttccacaattcactag

SEQ ID NO: 2646 - RNA, 20 nt, Homo sapiens
  source 1..20: mol_type = genomic RNA
gccttccacaattcactaga

SEQ ID NO: 2647 - RNA, 20 nt, Homo sapiens
  source 1..20: mol_type = genomic RNA
ccttccacaattcactagac

SEQ ID NO: 2648 - RNA, 20 nt, Homo sapiens
  source 1..20: mol_type = genomic RNA
cttccacaattcactagacc

SEQ ID NO: 2649 - RNA, 20 nt, Homo sapiens
  source 1..20: mol_type = genomic RNA
ttccacaattcactagacca

SEQ ID NO: 2650 - RNA, 20 nt, Homo sapiens
  source 1..20: mol_type = genomic RNA
tccacaattcactagaccag

SEQ ID NO: 2651 - RNA, 20 nt, Homo sapiens
  source 1..20: mol_type = genomic RNA
ccacaattcactagaccaga

SEQ ID NO: 2652 - RNA, 20 nt, Homo sapiens
  source 1..20: mol_type = genomic RNA
cacaattcactagaccagaa

SEQ ID NO: 2653 - RNA, 20 nt, Homo sapiens
  source 1..20: mol_type = genomic RNA
acaattcactagaccagaag

SEQ ID NO: 2654 - RNA, 20 nt, Homo sapiens
  source 1..20: mol_type = genomic RNA
caattcactagaccagaagt

SEQ ID NO: 2655 - RNA, 20 nt, Homo sapiens
  source 1..20: mol_type = genomic RNA
aattcactagaccagaagtg

SEQ ID NO: 2656 - RNA, 20 nt, Homo sapiens
  source 1..20: mol_type = genomic RNA
attcactagaccagaagtgg

SEQ ID NO: 2657 - RNA, 20 nt, Homo sapiens
  source 1..20: mol_type = genomic RNA
ttcactagaccagaagtgga

SEQ ID NO: 2658 - RNA, 20 nt, Homo sapiens
  source 1..20: mol_type = genomic RNA
tcactagaccagaagtggac

SEQ ID NO: 2659 - RNA, 20 nt, Homo sapiens
  source 1..20: mol_type = genomic RNA
cactagaccagaagtggacg

SEQ ID NO: 2660 - RNA, 20 nt, Homo sapiens
  source 1..20: mol_type = genomic RNA
actagaccagaagtggacgc

SEQ ID NO: 2661 - RNA, 20 nt, Homo sapiens
  source 1..20: mol_type = genomic RNA
ctagaccagaagtggacgca

SEQ ID NO: 2662 - RNA, 20 nt, Homo sapiens
  source 1..20: mol_type = genomic RNA
tagaccagaagtggacgcaa

SEQ ID NO: 2663 - RNA, 20 nt, Homo sapiens
  source 1..20: mol_type = genomic RNA
agaccagaagtggacgcaac

SEQ ID NO: 2664 - RNA, 20 nt, Homo sapiens
  source 1..20: mol_type = genomic RNA
gaccagaagtggacgcaact

SEQ ID NO: 2665 - RNA, 20 nt, Homo sapiens
  source 1..20: mol_type = genomic RNA
accagaagtggacgcaactt

SEQ ID NO: 2666 - RNA, 20 nt, Homo sapiens
  source 1..20: mol_type = genomic RNA
ccagaagtggacgcaactta

SEQ ID NO: 2667 - RNA, 20 nt, Homo sapiens
  source 1..20: mol_type = genomic RNA
cagaagtggacgcaacttaa

SEQ ID NO: 2668 - RNA, 20 nt, Homo sapiens
  source 1..20: mol_type = genomic RNA
agaagtggacgcaacttaag

SEQ ID NO: 2669 - RNA, 20 nt, Homo sapiens
  source 1..20: mol_type = genomic RNA
gaagtggacgcaacttaagc

SEQ ID NO: 2670 - RNA, 20 nt, Homo sapiens
  source 1..20: mol_type = genomic RNA
aagtggacgcaacttaagct

SEQ ID NO: 2671 - RNA, 20 nt, Homo sapiens
  source 1..20: mol_type = genomic RNA
agtggacgcaacttaagctg

SEQ ID NO: 2672 - RNA, 20 nt, Homo sapiens
  source 1..20: mol_type = genomic RNA
gtggacgcaacttaagctgg

SEQ ID NO: 2673 - RNA, 20 nt, Homo sapiens
  source 1..20: mol_type = genomic RNA
tggacgcaacttaagctggg

SEQ ID NO: 2674 - RNA, 20 nt, Homo sapiens
  source 1..20: mol_type = genomic RNA
ggacgcaacttaagctggga

SEQ ID NO: 2675 - RNA, 20 nt, Homo sapiens
  source 1..20: mol_type = genomic RNA
gacgcaacttaagctgggat

SEQ ID NO: 2676 - RNA, 20 nt, Homo sapiens
  source 1..20: mol_type = genomic RNA
acgcaacttaagctgggata

SEQ ID NO: 2677 - RNA, 20 nt, Homo sapiens
  source 1..20: mol_type = genomic RNA
cgcaacttaagctgggataa

SEQ ID NO: 2678 - RNA, 20 nt, Homo sapiens
  source 1..20: mol_type = genomic RNA
gcaacttaagctgggataat

SEQ ID NO: 2679 - RNA, 20 nt, Homo sapiens
  source 1..20: mol_type = genomic RNA
caacttaagctgggataatc

SEQ ID NO: 2680 - RNA, 20 nt, Homo sapiens
  source 1..20: mol_type = genomic RNA
aacttaagctgggataatca

SEQ ID NO: 2681 - RNA, 20 nt, Homo sapiens
  source 1..20: mol_type = genomic RNA
acttaagctgggataatcac

SEQ ID NO: 2682 - RNA, 20 nt, Homo sapiens
  source 1..20: mol_type = genomic RNA
cttaagctgggataatcaca

SEQ ID NO: 2683 - RNA, 20 nt, Homo sapiens
  source 1..20: mol_type = genomic RNA
ttaagctgggataatcacat

SEQ ID NO: 2684 - RNA, 20 nt, Homo sapiens
  source 1..20: mol_type = genomic RNA
taagctgggataatcacatt

SEQ ID NO: 2685 - RNA, 20 nt, Homo sapiens
  source 1..20: mol_type = genomic RNA
aagctgggataatcacatta

SEQ ID NO: 2686 - RNA, 20 nt, Homo sapiens
  source 1..20: mol_type = genomic RNA
agctgggataatcacattat

SEQ ID NO: 2687 - RNA, 20 nt, Homo sapiens
  source 1..20: mol_type = genomic RNA
gctgggataatcacattatc

SEQ ID NO: 2688 - RNA, 20 nt, Homo sapiens
  source 1..20: mol_type = genomic RNA
ctgggataatcacattatca

SEQ ID NO: 2689 - RNA, 20 nt, Homo sapiens
  source 1..20: mol_type = genomic RNA
tgggataatcacattatcat

SEQ ID NO: 2690 - RNA, 20 nt, Homo sapiens
  source 1..20: mol_type = genomic RNA
gggataatcacattatcatc

SEQ ID NO: 2691 - RNA, 20 nt, Homo sapiens
  source 1..20: mol_type = genomic RNA
ggataatcacattatcatct

SEQ ID NO: 2692 - RNA, 20 nt, Homo sapiens
  source 1..20: mol_type = genomic RNA
gataatcacattatcatctg

SEQ ID NO: 2693 - RNA, 20 nt, Homo sapiens
  source 1..20: mol_type = genomic RNA
ataatcacattatcatctga

SEQ ID NO: 2694 - RNA, 20 nt, Homo sapiens
  source 1..20: mol_type = genomic RNA
taatcacattatcatctgaa

SEQ ID NO: 2695 - RNA, 20 nt, Homo sapiens
  source 1..20: mol_type = genomic RNA
aatcacattatcatctgaaa

SEQ ID NO: 2696 - RNA, 20 nt, Homo sapiens
  source 1..20: mol_type = genomic RNA
atcacattatcatctgaaaa

SEQ ID NO: 2697 - RNA, 20 nt, Homo sapiens
  source 1..20: mol_type = genomic RNA
tcacattatcatctgaaaat

SEQ ID NO: 2698 - RNA, 20 nt, Homo sapiens
  source 1..20: mol_type = genomic RNA
cacattatcatctgaaaatc

SEQ ID NO: 2699 - RNA, 20 nt, Homo sapiens
  source 1..20: mol_type = genomic RNA
acattatcatctgaaaatct

SEQ ID NO: 2700 - RNA, 20 nt, Homo sapiens
  source 1..20: mol_type = genomic RNA
cattatcatctgaaaatctg

SEQ ID NO: 2701 - RNA, 20 nt, Homo sapiens
  source 1..20: mol_type = genomic RNA
attatcatctgaaaatctgg

SEQ ID NO: 2702 - RNA, 20 nt, Homo sapiens
  source 1..20: mol_type = genomic RNA
ttatcatctgaaaatctgga

SEQ ID NO: 2703 - RNA, 20 nt, Homo sapiens
  source 1..20: mol_type = genomic RNA
tatcatctgaaaatctggag

SEQ ID NO: 2704 - RNA, 20 nt, Homo sapiens
  source 1..20: mol_type = genomic RNA
atcatctgaaaatctggagt

SEQ ID NO: 2705 - RNA, 20 nt, Homo sapiens
  source 1..20: mol_type = genomic RNA
tcatctgaaaatctggagtt

SEQ ID NO: 2706 - RNA, 20 nt, Homo sapiens
  source 1..20: mol_type = genomic RNA
catctgaaaatctggagttg

SEQ ID NO: 2707 - RNA, 20 nt, Homo sapiens
  source 1..20: mol_type = genomic RNA
atctgaaaatctggagttga

SEQ ID NO: 2708 - RNA, 20 nt, Homo sapiens
  source 1..20: mol_type = genomic RNA
tctgaaaatctggagttgaa

SEQ ID NO: 2709 - RNA, 20 nt, Homo sapiens
  source 1..20: mol_type = genomic RNA
ctgaaaatctggagttgaac

SEQ ID NO: 2710 - RNA, 20 nt, Homo sapiens
  source 1..20: mol_type = genomic RNA
tgaaaatctggagttgaaca

SEQ ID NO: 2711 - RNA, 20 nt, Homo sapiens
  source 1..20: mol_type = genomic RNA
gaaaatctggagttgaacag

SEQ ID NO: 2712 - RNA, 20 nt, Homo sapiens
  source 1..20: mol_type = genomic RNA
aaaatctggagttgaacagc

SEQ ID NO: 2713 - RNA, 20 nt, Homo sapiens
  source 1..20: mol_type = genomic RNA
aaatctggagttgaacagca

SEQ ID NO: 2714 - RNA, 20 nt, Homo sapiens
  source 1..20: mol_type = genomic RNA
aatctggagttgaacagcaa

SEQ ID NO: 2715 - RNA, 20 nt, Homo sapiens
  source 1..20: mol_type = genomic RNA
atctggagttgaacagcaaa

SEQ ID NO: 2716 - RNA, 20 nt, Homo sapiens
  source 1..20: mol_type = genomic RNA
tctggagttgaacagcaaaa

SEQ ID NO: 2717 - RNA, 20 nt, Homo sapiens
  source 1..20: mol_type = genomic RNA
ctggagttgaacagcaaaag

SEQ ID NO: 2718 - RNA, 20 nt, Homo sapiens
  source 1..20: mol_type = genomic RNA
tggagttgaacagcaaaaga

SEQ ID NO: 2719 - RNA, 20 nt, Homo sapiens
  source 1..20: mol_type = genomic RNA
ggagttgaacagcaaaagaa

SEQ ID NO: 2720 - RNA, 20 nt, Homo sapiens
  source 1..20: mol_type = genomic RNA
gagttgaacagcaaaagaag

SEQ ID NO: 2721 - RNA, 20 nt, Homo sapiens
  source 1..20: mol_type = genomic RNA
agttgaacagcaaaagaaga

SEQ ID NO: 2722 - RNA, 20 nt, Homo sapiens
  source 1..20: mol_type = genomic RNA
gttgaacagcaaaagaagac

SEQ ID NO: 2723 - RNA, 20 nt, Homo sapiens
  source 1..20: mol_type = genomic RNA
ttgaacagcaaaagaagaca

SEQ ID NO: 2724 - RNA, 20 nt, Homo sapiens
  source 1..20: mol_type = genomic RNA
tgaacagcaaaagaagacaa

SEQ ID NO: 2725 - RNA, 20 nt, Homo sapiens
  source 1..20: mol_type = genomic RNA
gaacagcaaaagaagacaac

SEQ ID NO: 2726 - RNA, 20 nt, Homo sapiens
  source 1..20: mol_type = genomic RNA
aacagcaaaagaagacaaca

SEQ ID NO: 2727 - RNA, 20 nt, Homo sapiens
  source 1..20: mol_type = genomic RNA
acagcaaaagaagacaacat

SEQ ID NO: 2728 - RNA, 20 nt, Homo sapiens
  source 1..20: mol_type = genomic RNA
cagcaaaagaagacaacatt

SEQ ID NO: 2729 - RNA, 20 nt, Homo sapiens
  source 1..20: mol_type = genomic RNA
agcaaaagaagacaacattt

SEQ ID NO: 2730 - RNA, 20 nt, Homo sapiens
  source 1..20: mol_type = genomic RNA
gcaaaagaagacaacatttc

SEQ ID NO: 2731 - RNA, 20 nt, Homo sapiens
  source 1..20: mol_type = genomic RNA
caaaagaagacaacatttct

SEQ ID NO: 2732 - RNA, 20 nt, Homo sapiens
  source 1..20: mol_type = genomic RNA
aaaagaagacaacatttctc

SEQ ID NO: 2733 - RNA, 20 nt, Homo sapiens
  source 1..20: mol_type = genomic RNA
aaagaagacaacatttctca

SEQ ID NO: 2734 - RNA, 20 nt, Homo sapiens
  source 1..20: mol_type = genomic RNA
aagaagacaacatttctcaa

SEQ ID NO: 2735 - RNA, 20 nt, Homo sapiens
  source 1..20: mol_type = genomic RNA
agaagacaacatttctcaaa

SEQ ID NO: 2736 - RNA, 20 nt, Homo sapiens
  source 1..20: mol_type = genomic RNA
gaagacaacatttctcaaat

SEQ ID NO: 2737 - RNA, 20 nt, Homo sapiens
  source 1..20: mol_type = genomic RNA
aagacaacatttctcaaatg

SEQ ID NO: 2738 - RNA, 20 nt, Homo sapiens
  source 1..20: mol_type = genomic RNA
agacaacatttctcaaatgc

SEQ ID NO: 2739 - RNA, 20 nt, Homo sapiens
  source 1..20: mol_type = genomic RNA
gacaacatttctcaaatgca

SEQ ID NO: 2740 - RNA, 20 nt, Homo sapiens
  source 1..20: mol_type = genomic RNA
acaacatttctcaaatgcac

SEQ ID NO: 2741 - RNA, 20 nt, Homo sapiens
  source 1..20: mol_type = genomic RNA
caacatttctcaaatgcaca

SEQ ID NO: 2742 - RNA, 20 nt, Homo sapiens
  source 1..20: mol_type = genomic RNA
aacatttctcaaatgcacat

SEQ ID NO: 2743 - RNA, 20 nt, Homo sapiens
  source 1..20: mol_type = genomic RNA
acatttctcaaatgcacatc

SEQ ID NO: 2744 - RNA, 20 nt, Homo sapiens
  source 1..20: mol_type = genomic RNA
catttctcaaatgcacatct

SEQ ID NO: 2745 - RNA, 20 nt, Homo sapiens
  source 1..20: mol_type = genomic RNA
atttctcaaatgcacatctc

SEQ ID NO: 2746 - RNA, 20 nt, Homo sapiens
  source 1..20: mol_type = genomic RNA
tttctcaaatgcacatctca

SEQ ID NO: 2747 - RNA, 20 nt, Homo sapiens
  source 1..20: mol_type = genomic RNA
ttctcaaatgcacatctcat

SEQ ID NO: 2748 - RNA, 20 nt, Homo sapiens
  source 1..20: mol_type = genomic RNA
tctcaaatgcacatctcatg

SEQ ID NO: 2749 - RNA, 20 nt, Homo sapiens
  source 1..20: mol_type = genomic RNA
ctcaaatgcacatctcatgg

SEQ ID NO: 2750 - RNA, 20 nt, Homo sapiens
  source 1..20: mol_type = genomic RNA
tcaaatgcacatctcatggc

SEQ ID NO: 2751 - RNA, 20 nt, Homo sapiens
  source 1..20: mol_type = genomic RNA
caaatgcacatctcatggca

SEQ ID NO: 2752 - RNA, 20 nt, Homo sapiens
  source 1..20: mol_type = genomic RNA
aaatgcacatctcatggcag

SEQ ID NO: 2753 - RNA, 20 nt, Homo sapiens
  source 1..20: mol_type = genomic RNA
aatgcacatctcatggcagc

SEQ ID NO: 2754 - RNA, 20 nt, Homo sapiens
  source 1..20: mol_type = genomic RNA
atgcacatctcatggcagct

SEQ ID NO: 2755 - RNA, 20 nt, Homo sapiens
  source 1..20: mol_type = genomic RNA
tgcacatctcatggcagcta

SEQ ID NO: 2756 - RNA, 20 nt, Homo sapiens
  source 1..20: mol_type = genomic RNA
gcacatctcatggcagctaa

SEQ ID NO: 2757 - RNA, 20 nt, Homo sapiens
  source 1..20: mol_type = genomic RNA
cacatctcatggcagctaag

SEQ ID NO: 2758 - RNA, 20 nt, Homo sapiens
  source 1..20: mol_type = genomic RNA
acatctcatggcagctaagc

SEQ ID NO: 2759 - RNA, 20 nt, Homo sapiens
  source 1..20: mol_type = genomic RNA
catctcatggcagctaagcc

SEQ ID NO: 2760 - RNA, 20 nt, Homo sapiens
  source 1..20: mol_type = genomic RNA
atctcatggcagctaagcca

SEQ ID NO: 2761 - RNA, 20 nt, Homo sapiens
  source 1..20: mol_type = genomic RNA
tctcatggcagctaagccac

SEQ ID NO: 2762 - RNA, 20 nt, Homo sapiens
  source 1..20: mol_type = genomic RNA
ctcatggcagctaagccaca

SEQ ID NO: 2763 - RNA, 20 nt, Homo sapiens
  source 1..20: mol_type = genomic RNA
tcatggcagctaagccacat

SEQ ID NO: 2764 - RNA, 20 nt, Homo sapiens
  source 1..20: mol_type = genomic RNA
catggcagctaagccacatg

SEQ ID NO: 2765 - RNA, 20 nt, Homo sapiens
  source 1..20: mol_type = genomic RNA
atggcagctaagccacatgg

SEQ ID NO: 2766 - RNA, 20 nt, Homo sapiens
  source 1..20: mol_type = genomic RNA
tggcagctaagccacatggc

SEQ ID NO: 2767 - RNA, 20 nt, Homo sapiens
  source 1..20: mol_type = genomic RNA
ggcagctaagccacatggct

SEQ ID NO: 2768 - RNA, 20 nt, Homo sapiens
  source 1..20: mol_type = genomic RNA
gcagctaagccacatggctg

SEQ ID NO: 2769 - RNA, 20 nt, Homo sapiens
  source 1..20: mol_type = genomic RNA
cagctaagccacatggctgg

SEQ ID NO: 2770 - RNA, 20 nt, Homo sapiens
  source 1..20: mol_type = genomic RNA
agctaagccacatggctggg

SEQ ID NO: 2771 - RNA, 20 nt, Homo sapiens
  source 1..20: mol_type = genomic RNA
gctaagccacatggctggga

SEQ ID NO: 2772 - RNA, 20 nt, Homo sapiens
  source 1..20: mol_type = genomic RNA
ctaagccacatggctgggat

SEQ ID NO: 2773 - RNA, 20 nt, Homo sapiens
  source 1..20: mol_type = genomic RNA
taagccacatggctgggatt

SEQ ID NO: 2774 - RNA, 20 nt, Homo sapiens
  source 1..20: mol_type = genomic RNA
aagccacatggctgggattt

SEQ ID NO: 2775 - RNA, 20 nt, Homo sapiens
  source 1..20: mol_type = genomic RNA
agccacatggctgggattta

SEQ ID NO: 2776 - RNA, 20 nt, Homo sapiens
  source 1..20: mol_type = genomic RNA
gccacatggctgggatttaa

SEQ ID NO: 2777 - RNA, 20 nt, Homo sapiens
  source 1..20: mol_type = genomic RNA
ccacatggctgggatttaaa

SEQ ID NO: 2778 - RNA, 20 nt, Homo sapiens
  source 1..20: mol_type = genomic RNA
cacatggctgggatttaaag

SEQ ID NO: 2779 - RNA, 20 nt, Homo sapiens
  source 1..20: mol_type = genomic RNA
acatggctgggatttaaagc

SEQ ID NO: 2780 - RNA, 20 nt, Homo sapiens
  source 1..20: mol_type = genomic RNA
catggctgggatttaaagcc

SEQ ID NO: 2781 - RNA, 20 nt, Homo sapiens
  source 1..20: mol_type = genomic RNA
atggctgggatttaaagcct

SEQ ID NO: 2782 - RNA, 20 nt, Homo sapiens
  source 1..20: mol_type = genomic RNA
tggctgggatttaaagcctt

SEQ ID NO: 2783 - RNA, 20 nt, Homo sapiens
  source 1..20: mol_type = genomic RNA
ggctgggatttaaagccttt

SEQ ID NO: 2784 - RNA, 20 nt, Homo sapiens
  source 1..20: mol_type = genomic RNA
gctgggatttaaagccttta

SEQ ID NO: 2785 - RNA, 20 nt, Homo sapiens
  source 1..20: mol_type = genomic RNA
ctgggatttaaagcctttag

SEQ ID NO: 2786 - RNA, 20 nt, Homo sapiens
  source 1..20: mol_type = genomic RNA
tgggatttaaagcctttaga

SEQ ID NO: 2787 - RNA, 20 nt, Homo sapiens
  source 1..20: mol_type = genomic RNA
gggatttaaagcctttagag

SEQ ID NO: 2788 - RNA, 20 nt, Homo sapiens
  source 1..20: mol_type = genomic RNA
ggatttaaagcctttagagc

SEQ ID NO: 2789 - RNA, 20 nt, Homo sapiens
  source 1..20: mol_type = genomic RNA
gatttaaagcctttagagcc

SEQ ID NO: 2790 - RNA, 20 nt, Homo sapiens
  source 1..20: mol_type = genomic RNA
atttaaagcctttagagcca

SEQ ID NO: 2791 - RNA, 20 nt, Homo sapiens
  source 1..20: mol_type = genomic RNA
tttaaagcctttagagccag

SEQ ID NO: 2792 - RNA, 20 nt, Homo sapiens
  source 1..20: mol_type = genomic RNA
ttaaagcctttagagccagc

SEQ ID NO: 2793 - RNA, 20 nt, Homo sapiens
  source 1..20: mol_type = genomic RNA
taaagcctttagagccagcc

SEQ ID NO: 2794 - RNA, 20 nt, Homo sapiens
  source 1..20: mol_type = genomic RNA
aaagcctttagagccagccc

SEQ ID NO: 2795 - RNA, 20 nt, Homo sapiens
  source 1..20: mol_type = genomic RNA
aagcctttagagccagccca

SEQ ID NO: 2796 - RNA, 20 nt, Homo sapiens
  source 1..20: mol_type = genomic RNA
agcctttagagccagcccat

SEQ ID NO: 2797 - RNA, 20 nt, Homo sapiens
  source 1..20: mol_type = genomic RNA
gcctttagagccagcccatg

SEQ ID NO: 2798 - RNA, 20 nt, Homo sapiens
  source 1..20: mol_type = genomic RNA
cctttagagccagcccatgg

SEQ ID NO: 2799 - RNA, 20 nt, Homo sapiens
  source 1..20: mol_type = genomic RNA
ctttagagccagcccatggc

SEQ ID NO: 2800 - RNA, 20 nt, Homo sapiens
  source 1..20: mol_type = genomic RNA
tttagagccagcccatggct

SEQ ID NO: 2801 - RNA, 20 nt, Homo sapiens
  source 1..20: mol_type = genomic RNA
ttagagccagcccatggctt

SEQ ID NO: 2802 - RNA, 20 nt, Homo sapiens
  source 1..20: mol_type = genomic RNA
tagagccagcccatggcttt

SEQ ID NO: 2803 - RNA, 20 nt, Homo sapiens
  source 1..20: mol_type = genomic RNA
agagccagcccatggcttta

SEQ ID NO: 2804 - RNA, 20 nt, Homo sapiens
  source 1..20: mol_type = genomic RNA
gagccagcccatggctttag

SEQ ID NO: 2805 - RNA, 20 nt, Homo sapiens
  source 1..20: mol_type = genomic RNA
agccagcccatggctttagc

SEQ ID NO: 2806 - RNA, 20 nt, Homo sapiens
  source 1..20: mol_type = genomic RNA
gccagcccatggctttagct

SEQ ID NO: 2807 - RNA, 20 nt, Homo sapiens
  source 1..20: mol_type = genomic RNA
ccagcccatggctttagcta

SEQ ID NO: 2808 - RNA, 20 nt, Homo sapiens
  source 1..20: mol_type = genomic RNA
cagcccatggctttagctac

SEQ ID NO: 2809 - RNA, 20 nt, Homo sapiens
  source 1..20: mol_type = genomic RNA
agcccatggctttagctacc

SEQ ID NO: 2810 - RNA, 20 nt, Homo sapiens
  source 1..20: mol_type = genomic RNA
gcccatggctttagctacct

SEQ ID NO: 2811 - RNA, 20 nt, Homo sapiens
  source 1..20: mol_type = genomic RNA
cccatggctttagctacctc

SEQ ID NO: 2812 - RNA, 20 nt, Homo sapiens
  source 1..20: mol_type = genomic RNA
ccatggctttagctacctca

SEQ ID NO: 2813 - RNA, 20 nt, Homo sapiens
  source 1..20: mol_type = genomic RNA
catggctttagctacctcac

SEQ ID NO: 2814 - RNA, 20 nt, Homo sapiens
  source 1..20: mol_type = genomic RNA
atggctttagctacctcact

SEQ ID NO: 2815 - RNA, 20 nt, Homo sapiens
  source 1..20: mol_type = genomic RNA
tggctttagctacctcacta

SEQ ID NO: 2816 - RNA, 20 nt, Homo sapiens
  source 1..20: mol_type = genomic RNA
ggctttagctacctcactat

SEQ ID NO: 2817 - RNA, 20 nt, Homo sapiens
  source 1..20: mol_type = genomic RNA
gctttagctacctcactatg

SEQ ID NO: 2818 - RNA, 20 nt, Homo sapiens
  source 1..20: mol_type = genomic RNA
ctttagctacctcactatgc

SEQ ID NO: 2819 - RNA, 20 nt, Homo sapiens
  source 1..20: mol_type = genomic RNA
tttagctacctcactatgct

SEQ ID NO: 2820 - RNA, 20 nt, Homo sapiens
  source 1..20: mol_type = genomic RNA
ttagctacctcactatgctg

SEQ ID NO: 2821 - RNA, 20 nt, Homo sapiens
  source 1..20: mol_type = genomic RNA
tagctacctcactatgctgc

SEQ ID NO: 2822 - RNA, 20 nt, Homo sapiens
  source 1..20: mol_type = genomic RNA
agctacctcactatgctgct

SEQ ID NO: 2823 - RNA, 20 nt, Homo sapiens
  source 1..20: mol_type = genomic RNA
gctacctcactatgctgctt

SEQ ID NO: 2824 - RNA, 20 nt, Homo sapiens
  source 1..20: mol_type = genomic RNA
ctacctcactatgctgcttc

SEQ ID NO: 2825 - RNA, 20 nt, Homo sapiens
  source 1..20: mol_type = genomic RNA
tacctcactatgctgcttca

SEQ ID NO: 2826 - RNA, 20 nt, Homo sapiens
  source 1..20: mol_type = genomic RNA
acctcactatgctgcttcac

SEQ ID NO: 2827 - RNA, 20 nt, Homo sapiens
  source 1..20: mol_type = genomic RNA
cctcactatgctgcttcaca

SEQ ID NO: 2828 - RNA, 20 nt, Homo sapiens
  source 1..20: mol_type = genomic RNA
ctcactatgctgcttcacaa

SEQ ID NO: 2829 - RNA, 20 nt, Homo sapiens
  source 1..20: mol_type = genomic RNA
tcactatgctgcttcacaaa

SEQ ID NO: 2830 - RNA, 20 nt, Homo sapiens
  source 1..20: mol_type = genomic RNA
cactatgctgcttcacaaac

SEQ ID NO: 2831 - RNA, 20 nt, Homo sapiens
  source 1..20: mol_type = genomic RNA
actatgctgcttcacaaacc

SEQ ID NO: 2832 - RNA, 20 nt, Homo sapiens
  source 1..20: mol_type = genomic RNA
ctatgctgcttcacaaacct

SEQ ID NO: 2833 - RNA, 20 nt, Homo sapiens
  source 1..20: mol_type = genomic RNA
tatgctgcttcacaaacctt

SEQ ID NO: 2834 - RNA, 20 nt, Homo sapiens
  source 1..20: mol_type = genomic RNA
atgctgcttcacaaaccttg

SEQ ID NO: 2835 - RNA, 20 nt, Homo sapiens
  source 1..20: mol_type = genomic RNA
tgctgcttcacaaaccttgc

SEQ ID NO: 2836 - RNA, 20 nt, Homo sapiens
  source 1..20: mol_type = genomic RNA
gctgcttcacaaaccttgct

SEQ ID NO: 2837 - RNA, 20 nt, Homo sapiens
  source 1..20: mol_type = genomic RNA
ctgcttcacaaaccttgctc

SEQ ID NO: 2838 - RNA, 20 nt, Homo sapiens
  source 1..20: mol_type = genomic RNA
tgcttcacaaaccttgctcc

SEQ ID NO: 2839 - RNA, 20 nt, Homo sapiens
  source 1..20: mol_type = genomic RNA
gcttcacaaaccttgctcct

SEQ ID NO: 2840 - RNA, 20 nt, Homo sapiens
  source 1..20: mol_type = genomic RNA
cttcacaaaccttgctcctg

SEQ ID NO: 2841 - RNA, 20 nt, Homo sapiens
  source 1..20: mol_type = genomic RNA
ttcacaaaccttgctcctgt

SEQ ID NO: 2842 - RNA, 20 nt, Homo sapiens
  source 1..20: mol_type = genomic RNA
tcacaaaccttgctcctgtg

SEQ ID NO: 2843 - RNA, 20 nt, Homo sapiens
  source 1..20: mol_type = genomic RNA
cacaaaccttgctcctgtgt

SEQ ID NO: 2844 - RNA, 20 nt, Homo sapiens
  source 1..20: mol_type = genomic RNA
acaaaccttgctcctgtgta

SEQ ID NO: 2845 - RNA, 20 nt, Homo sapiens
  source 1..20: mol_type = genomic RNA
caaaccttgctcctgtgtaa

SEQ ID NO: 2846 - RNA, 20 nt, Homo sapiens
  source 1..20: mol_type = genomic RNA
aaaccttgctcctgtgtaaa

SEQ ID NO: 2847 - RNA, 20 nt, Homo sapiens
  source 1..20: mol_type = genomic RNA
aaccttgctcctgtgtaaaa

SEQ ID NO: 2848 - RNA, 20 nt, Homo sapiens
  source 1..20: mol_type = genomic RNA
accttgctcctgtgtaaaac

SEQ ID NO: 2849 - RNA, 20 nt, Homo sapiens
  source 1..20: mol_type = genomic RNA
ccttgctcctgtgtaaaact

SEQ ID NO: 2850 - RNA, 20 nt, Homo sapiens
  source 1..20: mol_type = genomic RNA
cttgctcctgtgtaaaacta

SEQ ID NO: 2851 - RNA, 20 nt, Homo sapiens
  source 1..20: mol_type = genomic RNA
ttgctcctgtgtaaaactat

SEQ ID NO: 2852 - RNA, 20 nt, Homo sapiens
  source 1..20: mol_type = genomic RNA
tgctcctgtgtaaaactata

SEQ ID NO: 2853 - RNA, 20 nt, Homo sapiens
  source 1..20: mol_type = genomic RNA
gctcctgtgtaaaactatat

SEQ ID NO: 2854 - RNA, 20 nt, Homo sapiens
  source 1..20: mol_type = genomic RNA
ctcctgtgtaaaactatatt

SEQ ID NO: 2855 - RNA, 20 nt, Homo sapiens
  source 1..20: mol_type = genomic RNA
tcctgtgtaaaactatattc

SEQ ID NO: 2856 - RNA, 20 nt, Homo sapiens
  source 1..20: mol_type = genomic RNA
cctgtgtaaaactatattct

SEQ ID NO: 2857 - RNA, 20 nt, Homo sapiens
  source 1..20: mol_type = genomic RNA
ctgtgtaaaactatattctc

SEQ ID NO: 2858 - RNA, 20 nt, Homo sapiens
  source 1..20: mol_type = genomic RNA
tgtgtaaaactatattctca

SEQ ID NO: 2859 - RNA, 20 nt, Homo sapiens
  source 1..20: mol_type = genomic RNA
gtgtaaaactatattctcag

SEQ ID NO: 2860 - RNA, 20 nt, Homo sapiens
  source 1..20: mol_type = genomic RNA
tgtaaaactatattctcagt

SEQ ID NO: 2861 - RNA, 20 nt, Homo sapiens
  source 1..20: mol_type = genomic RNA
gtaaaactatattctcagtg

SEQ ID NO: 2862 - RNA, 20 nt, Homo sapiens
  source 1..20: mol_type = genomic RNA
taaaactatattctcagtgt

SEQ ID NO: 2863 - RNA, 20 nt, Homo sapiens
  source 1..20: mol_type = genomic RNA
aaaactatattctcagtgta

SEQ ID NO: 2864 - RNA, 20 nt, Homo sapiens
  source 1..20: mol_type = genomic RNA
aaactatattctcagtgtag

SEQ ID NO: 2865 - RNA, 20 nt, Homo sapiens
  source 1..20: mol_type = genomic RNA
aactatattctcagtgtagg

SEQ ID NO: 2866 - RNA, 20 nt, Homo sapiens
  source 1..20: mol_type = genomic RNA
actatattctcagtgtaggg

SEQ ID NO: 2867 - RNA, 20 nt, Homo sapiens
  source 1..20: mol_type = genomic RNA
ctatattctcagtgtagggc

SEQ ID NO: 2868 - RNA, 20 nt, Homo sapiens
  source 1..20: mol_type = genomic RNA
tatattctcagtgtagggca

SEQ ID NO: 2869 - RNA, 20 nt, Homo sapiens
  source 1..20: mol_type = genomic RNA
atattctcagtgtagggcag

SEQ ID NO: 2870 - RNA, 20 nt, Homo sapiens
  source 1..20: mol_type = genomic RNA
tattctcagtgtagggcaga

SEQ ID NO: 2871 - RNA, 20 nt, Homo sapiens
  source 1..20: mol_type = genomic RNA
attctcagtgtagggcagag

SEQ ID NO: 2872 - RNA, 20 nt, Homo sapiens
  source 1..20: mol_type = genomic RNA
ttctcagtgtagggcagaga

SEQ ID NO: 2873 - RNA, 20 nt, Homo sapiens
  source 1..20: mol_type = genomic RNA
tctcagtgtagggcagagag

SEQ ID NO: 2874 - RNA, 20 nt, Homo sapiens
  source 1..20: mol_type = genomic RNA
ctcagtgtagggcagagagg

SEQ ID NO: 2875 - RNA, 20 nt, Homo sapiens
  source 1..20: mol_type = genomic RNA
tcagtgtagggcagagaggt

SEQ ID NO: 2876 - RNA, 20 nt, Homo sapiens
  source 1..20: mol_type = genomic RNA
cagtgtagggcagagaggtc

SEQ ID NO: 2877 - RNA, 20 nt, Homo sapiens
  source 1..20: mol_type = genomic RNA
agtgtagggcagagaggtct

SEQ ID NO: 2878 - RNA, 20 nt, Homo sapiens
  source 1..20: mol_type = genomic RNA
gtgtagggcagagaggtcta

SEQ ID NO: 2879 - RNA, 20 nt, Homo sapiens
  source 1..20: mol_type = genomic RNA
tgtagggcagagaggtctaa

SEQ ID NO: 2880 - RNA, 20 nt, Homo sapiens
  source 1..20: mol_type = genomic RNA
gtagggcagagaggtctaac

SEQ ID NO: 2881 - RNA, 20 nt, Homo sapiens
  source 1..20: mol_type = genomic RNA
tagggcagagaggtctaaca

SEQ ID NO: 2882 - RNA, 20 nt, Homo sapiens
  source 1..20: mol_type = genomic RNA
agggcagagaggtctaacac

SEQ ID NO: 2883 - RNA, 20 nt, Homo sapiens
  source 1..20: mol_type = genomic RNA
gggcagagaggtctaacacc

SEQ ID NO: 2884 - RNA, 20 nt, Homo sapiens
  source 1..20: mol_type = genomic RNA
ggcagagaggtctaacacca

SEQ ID NO: 2885 - RNA, 20 nt, Homo sapiens
  source 1..20: mol_type = genomic RNA
gcagagaggtctaacaccaa

SEQ ID NO: 2886 - RNA, 20 nt, Homo sapiens
  source 1..20: mol_type = genomic RNA
cagagaggtctaacaccaac

SEQ ID NO: 2887 - RNA, 20 nt, Homo sapiens
  source 1..20: mol_type = genomic RNA
agagaggtctaacaccaaca

SEQ ID NO: 2888 - RNA, 20 nt, Homo sapiens
  source 1..20: mol_type = genomic RNA
gagaggtctaacaccaacat

SEQ ID NO: 2889 - RNA, 20 nt, Homo sapiens
  source 1..20: mol_type = genomic RNA
agaggtctaacaccaacata

SEQ ID NO: 2890 - RNA, 20 nt, Homo sapiens
  source 1..20: mol_type = genomic RNA
gaggtctaacaccaacataa

SEQ ID NO: 2891 - RNA, 20 nt, Homo sapiens
  source 1..20: mol_type = genomic RNA
aggtctaacaccaacataag

SEQ ID NO: 2892 - RNA, 20 nt, Homo sapiens
  source 1..20: mol_type = genomic RNA
ggtctaacaccaacataagg

SEQ ID NO: 2893 - RNA, 20 nt, Homo sapiens
  source 1..20: mol_type = genomic RNA
gtctaacaccaacataaggt

SEQ ID NO: 2894 - RNA, 20 nt, Homo sapiens
  source 1..20: mol_type = genomic RNA
tctaacaccaacataaggta

SEQ ID NO: 2895 - RNA, 20 nt, Homo sapiens
  source 1..20: mol_type = genomic RNA
ctaacaccaacataaggtac

SEQ ID NO: 2896 - RNA, 20 nt, Homo sapiens
  source 1..20: mol_type = genomic RNA
taacaccaacataaggtact

SEQ ID NO: 2897 - RNA, 20 nt, Homo sapiens
  source 1..20: mol_type = genomic RNA
aacaccaacataaggtacta

SEQ ID NO: 2898 - RNA, 20 nt, Homo sapiens
  source 1..20: mol_type = genomic RNA
acaccaacataaggtactag

SEQ ID NO: 2899 - RNA, 20 nt, Homo sapiens
  source 1..20: mol_type = genomic RNA
caccaacataaggtactagc

SEQ ID NO: 2900 - RNA, 20 nt, Homo sapiens
  source 1..20: mol_type = genomic RNA
accaacataaggtactagca

SEQ ID NO: 2901 - RNA, 20 nt, Homo sapiens
  source 1..20: mol_type = genomic RNA
ccaacataaggtactagcag

SEQ ID NO: 2902 - RNA, 20 nt, Homo sapiens
  source 1..20: mol_type = genomic RNA
caacataaggtactagcagt

SEQ ID NO: 2903 - RNA, 20 nt, Homo sapiens
  source 1..20: mol_type = genomic RNA
aacataaggtactagcagtg

SEQ ID NO: 2904 - RNA, 20 nt, Homo sapiens
  source 1..20: mol_type = genomic RNA
acataaggtactagcagtgt

SEQ ID NO: 2905 - RNA, 20 nt, Homo sapiens
  source 1..20: mol_type = genomic RNA
cataaggtactagcagtgtt

SEQ ID NO: 2906 - RNA, 20 nt, Homo sapiens
  source 1..20: mol_type = genomic RNA
ataaggtactagcagtgttt

SEQ ID NO: 2907 - RNA, 20 nt, Homo sapiens
  source 1..20: mol_type = genomic RNA
taaggtactagcagtgtttc

SEQ ID NO: 2908 - RNA, 20 nt, Homo sapiens
  source 1..20: mol_type = genomic RNA
aaggtactagcagtgtttcc

SEQ ID NO: 2909 - RNA, 20 nt, Homo sapiens
  source 1..20: mol_type = genomic RNA
aggtactagcagtgtttccc

SEQ ID NO: 2910 - RNA, 20 nt, Homo sapiens
  source 1..20: mol_type = genomic RNA
ggtactagcagtgtttcccg

SEQ ID NO: 2911 - RNA, 20 nt, Homo sapiens
  source 1..20: mol_type = genomic RNA
gtactagcagtgtttcccgt

SEQ ID NO: 2912 - RNA, 20 nt, Homo sapiens
  source 1..20: mol_type = genomic RNA
tactagcagtgtttcccgta

SEQ ID NO: 2913 - RNA, 20 nt, Homo sapiens
  source 1..20: mol_type = genomic RNA
actagcagtgtttcccgtat

SEQ ID NO: 2914 - RNA, 20 nt, Homo sapiens
  source 1..20: mol_type = genomic RNA
ctagcagtgtttcccgtatt

SEQ ID NO: 2915 - RNA, 20 nt, Homo sapiens
  source 1..20: mol_type = genomic RNA
tagcagtgtttcccgtattg

SEQ ID NO: 2916 - RNA, 20 nt, Homo sapiens
  source 1..20: mol_type = genomic RNA
agcagtgtttcccgtattga

SEQ ID NO: 2917 - RNA, 20 nt, Homo sapiens
  source 1..20: mol_type = genomic RNA
gcagtgtttcccgtattgac

SEQ ID NO: 2918 - RNA, 20 nt, Homo sapiens
  source 1..20: mol_type = genomic RNA
cagtgtttcccgtattgaca

SEQ ID NO: 2919 - RNA, 20 nt, Homo sapiens
  source 1..20: mol_type = genomic RNA
agtgtttcccgtattgacag

SEQ ID NO: 2920 - RNA, 20 nt, Homo sapiens
  source 1..20: mol_type = genomic RNA
gtgtttcccgtattgacagg

SEQ ID NO: 2921 - RNA, 20 nt, Homo sapiens
  source 1..20: mol_type = genomic RNA
tgtttcccgtattgacagga

SEQ ID NO: 2922 - RNA, 20 nt, Homo sapiens
  source 1..20: mol_type = genomic RNA
gtttcccgtattgacaggaa

SEQ ID NO: 2923 - RNA, 20 nt, Homo sapiens
  source 1..20: mol_type = genomic RNA
tttcccgtattgacaggaat

SEQ ID NO: 2924 - RNA, 20 nt, Homo sapiens
  source 1..20: mol_type = genomic RNA
ttcccgtattgacaggaata

SEQ ID NO: 2925 - RNA, 20 nt, Homo sapiens
  source 1..20: mol_type = genomic RNA
tcccgtattgacaggaatac

SEQ ID NO: 2926 - RNA, 20 nt, Homo sapiens
  source 1..20: mol_type = genomic RNA
cccgtattgacaggaatact

SEQ ID NO: 2927 - RNA, 20 nt, Homo sapiens
  source 1..20: mol_type = genomic RNA
ccgtattgacaggaatactt

SEQ ID NO: 2928 - RNA, 20 nt, Homo sapiens
  source 1..20: mol_type = genomic RNA
cgtattgacaggaatactta

SEQ ID NO: 2929 - RNA, 20 nt, Homo sapiens
  source 1..20: mol_type = genomic RNA
gtattgacaggaatacttaa

SEQ ID NO: 2930 - RNA, 20 nt, Homo sapiens
  source 1..20: mol_type = genomic RNA
tattgacaggaatacttaac

SEQ ID NO: 2931 - RNA, 20 nt, Homo sapiens
  source 1..20: mol_type = genomic RNA
attgacaggaatacttaact

SEQ ID NO: 2932 - RNA, 20 nt, Homo sapiens
  source 1..20: mol_type = genomic RNA
ttgacaggaatacttaactc

SEQ ID NO: 2933 - RNA, 20 nt, Homo sapiens
  source 1..20: mol_type = genomic RNA
tgacaggaatacttaactca

SEQ ID NO: 2934 - RNA, 20 nt, Homo sapiens
  source 1..20: mol_type = genomic RNA
gacaggaatacttaactcaa

SEQ ID NO: 2935 - RNA, 20 nt, Homo sapiens
  source 1..20: mol_type = genomic RNA
acaggaatacttaactcaat

SEQ ID NO: 2936 - RNA, 20 nt, Homo sapiens
  source 1..20: mol_type = genomic RNA
caggaatacttaactcaata

SEQ ID NO: 2937 - RNA, 20 nt, Homo sapiens
  source 1..20: mol_type = genomic RNA
aggaatacttaactcaataa

SEQ ID NO: 2938 - RNA, 20 nt, Homo sapiens
  source 1..20: mol_type = genomic RNA
ggaatacttaactcaataat

SEQ ID NO: 2939 - RNA, 20 nt, Homo sapiens
  source 1..20: mol_type = genomic RNA
gaatacttaactcaataatt

SEQ ID NO: 2940 - RNA, 20 nt, Homo sapiens
  source 1..20: mol_type = genomic RNA
aatacttaactcaataattc

SEQ ID NO: 2941 - RNA, 20 nt, Homo sapiens
  source 1..20: mol_type = genomic RNA
atacttaactcaataattct

SEQ ID NO: 2942 - RNA, 20 nt, Homo sapiens
  source 1..20: mol_type = genomic RNA
tacttaactcaataattctt

SEQ ID NO: 2943 - RNA, 20 nt, Homo sapiens
  source 1..20: mol_type = genomic RNA
acttaactcaataattcttt

SEQ ID NO: 2944 - RNA, 20 nt, Homo sapiens
  source 1..20: mol_type = genomic RNA
cttaactcaataattctttt

SEQ ID NO: 2945 - RNA, 20 nt, Homo sapiens
  source 1..20: mol_type = genomic RNA
ttaactcaataattcttttc

SEQ ID NO: 2946 - RNA, 20 nt, Homo sapiens
  source 1..20: mol_type = genomic RNA
taactcaataattcttttct

SEQ ID NO: 2947 - RNA, 20 nt, Homo sapiens
  source 1..20: mol_type = genomic RNA
aactcaataattcttttctt

SEQ ID NO: 2948 - RNA, 20 nt, Homo sapiens
  source 1..20: mol_type = genomic RNA
actcaataattcttttcttt

SEQ ID NO: 2949 - RNA, 20 nt, Homo sapiens
  source 1..20: mol_type = genomic RNA
ctcaataattcttttctttt

SEQ ID NO: 2950 - RNA, 20 nt, Homo sapiens
  source 1..20: mol_type = genomic RNA
tcaataattcttttcttttc

SEQ ID NO: 2951 - RNA, 20 nt, Homo sapiens
  source 1..20: mol_type = genomic RNA
caataattcttttcttttcc

SEQ ID NO: 2952 - RNA, 20 nt, Homo sapiens
  source 1..20: mol_type = genomic RNA
aataattcttttcttttcca

SEQ ID NO: 2953 - RNA, 20 nt, Homo sapiens
  source 1..20: mol_type = genomic RNA
ataattcttttcttttccat

SEQ ID NO: 2954 - RNA, 20 nt, Homo sapiens
  source 1..20: mol_type = genomic RNA
taattcttttcttttccatt

SEQ ID NO: 2955 - RNA, 20 nt, Homo sapiens
  source 1..20: mol_type = genomic RNA
aattcttttcttttccattt

SEQ ID NO: 2956 - RNA, 20 nt, Homo sapiens
  source 1..20: mol_type = genomic RNA
attcttttcttttccattta

SEQ ID NO: 2957 - RNA, 20 nt, Homo sapiens
  source 1..20: mol_type = genomic RNA
ttcttttcttttccatttag

SEQ ID NO: 2958 - RNA, 20 nt, Homo sapiens
  source 1..20: mol_type = genomic RNA
tcttttcttttccatttagt

SEQ ID NO: 2959 - RNA, 20 nt, Homo sapiens
  source 1..20: mol_type = genomic RNA
cttttcttttccatttagta

SEQ ID NO: 2960 - RNA, 20 nt, Homo sapiens
  source 1..20: mol_type = genomic RNA
ttttcttttccatttagtaa

SEQ ID NO: 2961 - RNA, 20 nt, Homo sapiens
  source 1..20: mol_type = genomic RNA
tttcttttccatttagtaac

SEQ ID NO: 2962 - RNA, 20 nt, Homo sapiens
  source 1..20: mol_type = genomic RNA
ttcttttccatttagtaaca

SEQ ID NO: 2963 - RNA, 20 nt, Homo sapiens
  source 1..20: mol_type = genomic RNA
tcttttccatttagtaacag

SEQ ID NO: 2964 - RNA, 20 nt, Homo sapiens
  source 1..20: mol_type = genomic RNA
cttttccatttagtaacagt

SEQ ID NO: 2965 - RNA, 20 nt, Homo sapiens
  source 1..20: mol_type = genomic RNA
ttttccatttagtaacagtt

SEQ ID NO: 2966 - RNA, 20 nt, Homo sapiens
  source 1..20: mol_type = genomic RNA
tttccatttagtaacagttg

SEQ ID NO: 2967 - RNA, 20 nt, Homo sapiens
  source 1..20: mol_type = genomic RNA
ttccatttagtaacagttgt

SEQ ID NO: 2968 - RNA, 20 nt, Homo sapiens
  source 1..20: mol_type = genomic RNA
tccatttagtaacagttgtg

SEQ ID NO: 2969 - RNA, 20 nt, Homo sapiens
  source 1..20: mol_type = genomic RNA
ccatttagtaacagttgtga

SEQ ID NO: 2970 - RNA, 20 nt, Homo sapiens
  source 1..20: mol_type = genomic RNA
catttagtaacagttgtgat

SEQ ID NO: 2971 - RNA, 20 nt, Homo sapiens
  source 1..20: mol_type = genomic RNA
atttagtaacagttgtgatg

SEQ ID NO: 2972 - RNA, 20 nt, Homo sapiens
  source 1..20: mol_type = genomic RNA
tttagtaacagttgtgatga

SEQ ID NO: 2973 - RNA, 20 nt, Homo sapiens
  source 1..20: mol_type = genomic RNA
ttagtaacagttgtgatgac

SEQ ID NO: 2974 - RNA, 20 nt, Homo sapiens
  source 1..20: mol_type = genomic RNA
tagtaacagttgtgatgact

SEQ ID NO: 2975 - RNA, 20 nt, Homo sapiens
  source 1..20: mol_type = genomic RNA
agtaacagttgtgatgacta

SEQ ID NO: 2976 - RNA, 20 nt, Homo sapiens
  source 1..20: mol_type = genomic RNA
gtaacagttgtgatgactat

SEQ ID NO: 2977 - RNA, 20 nt, Homo sapiens
  source 1..20: mol_type = genomic RNA
taacagttgtgatgactatg

SEQ ID NO: 2978 - RNA, 20 nt, Homo sapiens
  source 1..20: mol_type = genomic RNA
aacagttgtgatgactatgt

SEQ ID NO: 2979 - RNA, 20 nt, Homo sapiens
  source 1..20: mol_type = genomic RNA
acagttgtgatgactatgtt

SEQ ID NO: 2980 - RNA, 20 nt, Homo sapiens
  source 1..20: mol_type = genomic RNA
cagttgtgatgactatgttt

SEQ ID NO: 2981 - RNA, 20 nt, Homo sapiens
  source 1..20: mol_type = genomic RNA
agttgtgatgactatgtttc

SEQ ID NO: 2982 - RNA, 20 nt, Homo sapiens
  source 1..20: mol_type = genomic RNA
gttgtgatgactatgtttct

SEQ ID NO: 2983 - RNA, 20 nt, Homo sapiens
  source 1..20: mol_type = genomic RNA
ttgtgatgactatgtttcta

SEQ ID NO: 2984 - RNA, 20 nt, Homo sapiens
  source 1..20: mol_type = genomic RNA
tgtgatgactatgtttctat

SEQ ID NO: 2985 - RNA, 20 nt, Homo sapiens
  source 1..20: mol_type = genomic RNA
gtgatgactatgtttctatt

SEQ ID NO: 2986 - RNA, 20 nt, Homo sapiens
  source 1..20: mol_type = genomic RNA
tgatgactatgtttctattc

SEQ ID NO: 2987 - RNA, 20 nt, Homo sapiens
  source 1..20: mol_type = genomic RNA
gatgactatgtttctattct

SEQ ID NO: 2988 - RNA, 20 nt, Homo sapiens
  source 1..20: mol_type = genomic RNA
atgactatgtttctattcta

SEQ ID NO: 2989 - RNA, 20 nt, Homo sapiens
  source 1..20: mol_type = genomic RNA
tgactatgtttctattctaa

SEQ ID NO: 2990 - RNA, 20 nt, Homo sapiens
  source 1..20: mol_type = genomic RNA
gactatgtttctattctaag

SEQ ID NO: 2991 - RNA, 20 nt, Homo sapiens
  source 1..20: mol_type = genomic RNA
actatgtttctattctaagt

SEQ ID NO: 2992 - RNA, 20 nt, Homo sapiens
  source 1..20: mol_type = genomic RNA
ctatgtttctattctaagta

SEQ ID NO: 2993 - RNA, 20 nt, Homo sapiens
  source 1..20: mol_type = genomic RNA
tatgtttctattctaagtaa

SEQ ID NO: 2994 - RNA, 20 nt, Homo sapiens
  source 1..20: mol_type = genomic RNA
atgtttctattctaagtaat

SEQ ID NO: 2995 - RNA, 20 nt, Homo sapiens
  source 1..20: mol_type = genomic RNA
tgtttctattctaagtaatt

SEQ ID NO: 2996 - RNA, 20 nt, Homo sapiens
  source 1..20: mol_type = genomic RNA
gtttctattctaagtaattc

SEQ ID NO: 2997 - RNA, 20 nt, Homo sapiens
  source 1..20: mol_type = genomic RNA
tttctattctaagtaattcc

SEQ ID NO: 2998 - RNA, 20 nt, Homo sapiens
  source 1..20: mol_type = genomic RNA
ttctattctaagtaattcct

SEQ ID NO: 2999 - RNA, 20 nt, Homo sapiens
  source 1..20: mol_type = genomic RNA
tctattctaagtaattcctg

SEQ ID NO: 3000 - RNA, 20 nt, Homo sapiens
  source 1..20: mol_type = genomic RNA
ctattctaagtaattcctgt

SEQ ID NO: 3001 - RNA, 20 nt, Homo sapiens
  source 1..20: mol_type = genomic RNA
tattctaagtaattcctgta

SEQ ID NO: 3002 - RNA, 20 nt, Homo sapiens
  source 1..20: mol_type = genomic RNA
attctaagtaattcctgtat

SEQ ID NO: 3003 - RNA, 20 nt, Homo sapiens
  source 1..20: mol_type = genomic RNA
ttctaagtaattcctgtatt

SEQ ID NO: 3004 - RNA, 20 nt, Homo sapiens
  source 1..20: mol_type = genomic RNA
tctaagtaattcctgtattc

SEQ ID NO: 3005 - RNA, 20 nt, Homo sapiens
  source 1..20: mol_type = genomic RNA
ctaagtaattcctgtattct

SEQ ID NO: 3006 - RNA, 20 nt, Homo sapiens
  source 1..20: mol_type = genomic RNA
taagtaattcctgtattcta

SEQ ID NO: 3007 - RNA, 20 nt, Homo sapiens
  source 1..20: mol_type = genomic RNA
aagtaattcctgtattctac

SEQ ID NO: 3008 - RNA, 20 nt, Homo sapiens
  source 1..20: mol_type = genomic RNA
agtaattcctgtattctaca

SEQ ID NO: 3009 - RNA, 20 nt, Homo sapiens
  source 1..20: mol_type = genomic RNA
gtaattcctgtattctacag

SEQ ID NO: 3010 - RNA, 20 nt, Homo sapiens
  source 1..20: mol_type = genomic RNA
taattcctgtattctacagc

SEQ ID NO: 3011 - RNA, 20 nt, Homo sapiens
  source 1..20: mol_type = genomic RNA
aattcctgtattctacagca

SEQ ID NO: 3012 - RNA, 20 nt, Homo sapiens
  source 1..20: mol_type = genomic RNA
attcctgtattctacagcag

SEQ ID NO: 3013 - RNA, 20 nt, Homo sapiens
  source 1..20: mol_type = genomic RNA
ttcctgtattctacagcaga

SEQ ID NO: 3014 - RNA, 20 nt, Homo sapiens
  source 1..20: mol_type = genomic RNA
tcctgtattctacagcagat

SEQ ID NO: 3015 - RNA, 20 nt, Homo sapiens
  source 1..20: mol_type = genomic RNA
cctgtattctacagcagata

SEQ ID NO: 3016 - RNA, 20 nt, Homo sapiens
  source 1..20: mol_type = genomic RNA
ctgtattctacagcagatac

SEQ ID NO: 3017 - RNA, 20 nt, Homo sapiens
  source 1..20: mol_type = genomic RNA
tgtattctacagcagatact

SEQ ID NO: 3018 - RNA, 20 nt, Homo sapiens
  source 1..20: mol_type = genomic RNA
gtattctacagcagatactt

SEQ ID NO: 3019 - RNA, 20 nt, Homo sapiens
  source 1..20: mol_type = genomic RNA
tattctacagcagatacttt

SEQ ID NO: 3020 - RNA, 20 nt, Homo sapiens
  source 1..20: mol_type = genomic RNA
attctacagcagatactttg

SEQ ID NO: 3021 - RNA, 20 nt, Homo sapiens
  source 1..20: mol_type = genomic RNA
ttctacagcagatactttgt

SEQ ID NO: 3022 - RNA, 20 nt, Homo sapiens
  source 1..20: mol_type = genomic RNA
tctacagcagatactttgtc

SEQ ID NO: 3023 - RNA, 20 nt, Homo sapiens
  source 1..20: mol_type = genomic RNA
ctacagcagatactttgtca

SEQ ID NO: 3024 - RNA, 20 nt, Homo sapiens
  source 1..20: mol_type = genomic RNA
tacagcagatactttgtcag

SEQ ID NO: 3025 - RNA, 20 nt, Homo sapiens
  source 1..20: mol_type = genomic RNA
acagcagatactttgtcagc

SEQ ID NO: 3026 - RNA, 20 nt, Homo sapiens
  source 1..20: mol_type = genomic RNA
cagcagatactttgtcagca

SEQ ID NO: 3027 - RNA, 20 nt, Homo sapiens
  source 1..20: mol_type = genomic RNA
agcagatactttgtcagcaa

SEQ ID NO: 3028 - RNA, 20 nt, Homo sapiens
  source 1..20: mol_type = genomic RNA
gcagatactttgtcagcaat

SEQ ID NO: 3029 - RNA, 20 nt, Homo sapiens
  source 1..20: mol_type = genomic RNA
cagatactttgtcagcaata

SEQ ID NO: 3030 - RNA, 20 nt, Homo sapiens
  source 1..20: mol_type = genomic RNA
agatactttgtcagcaatac

SEQ ID NO: 3031 - RNA, 20 nt, Homo sapiens
  source 1..20: mol_type = genomic RNA
gatactttgtcagcaatact

SEQ ID NO: 3032 - RNA, 20 nt, Homo sapiens
  source 1..20: mol_type = genomic RNA
atactttgtcagcaatacta

SEQ ID NO: 3033 - RNA, 20 nt, Homo sapiens
  source 1..20: mol_type = genomic RNA
tactttgtcagcaatactaa

SEQ ID NO: 3034 - RNA, 20 nt, Homo sapiens
  source 1..20: mol_type = genomic RNA
actttgtcagcaatactaag

SEQ ID NO: 3035 - RNA, 20 nt, Homo sapiens
  source 1..20: mol_type = genomic RNA
ctttgtcagcaatactaagg

SEQ ID NO: 3036 - RNA, 20 nt, Homo sapiens
  source 1..20: mol_type = genomic RNA
tttgtcagcaatactaaggg

SEQ ID NO: 3037 - RNA, 20 nt, Homo sapiens
  source 1..20: mol_type = genomic RNA
ttgtcagcaatactaaggga

SEQ ID NO: 3038 - RNA, 20 nt, Homo sapiens
  source 1..20: mol_type = genomic RNA
tgtcagcaatactaagggaa

SEQ ID NO: 3039 - RNA, 20 nt, Homo sapiens
  source 1..20: mol_type = genomic RNA
gtcagcaatactaagggaag

SEQ ID NO: 3040 - RNA, 20 nt, Homo sapiens
  source 1..20: mol_type = genomic RNA
tcagcaatactaagggaaga

SEQ ID NO: 3041 - RNA, 20 nt, Homo sapiens
  source 1..20: mol_type = genomic RNA
cagcaatactaagggaagaa

SEQ ID NO: 3042 - RNA, 20 nt, Homo sapiens
  source 1..20: mol_type = genomic RNA
agcaatactaagggaagaaa

SEQ ID NO: 3043 - RNA, 20 nt, Homo sapiens
  source 1..20: mol_type = genomic RNA
gcaatactaagggaagaaac

SEQ ID NO: 3044 - RNA, 20 nt, Homo sapiens
  source 1..20: mol_type = genomic RNA
caatactaagggaagaaaca

SEQ ID NO: 3045 - RNA, 20 nt, Homo sapiens
  source 1..20: mol_type = genomic RNA
aatactaagggaagaaacaa

SEQ ID NO: 3046 - RNA, 20 nt, Homo sapiens
  source 1..20: mol_type = genomic RNA
atactaagggaagaaacaaa

SEQ ID NO: 3047 - RNA, 20 nt, Homo sapiens
  source 1..20: mol_type = genomic RNA
tactaagggaagaaacaaag

SEQ ID NO: 3048 - RNA, 20 nt, Homo sapiens
  source 1..20: mol_type = genomic RNA
actaagggaagaaacaaagt

SEQ ID NO: 3049 - RNA, 20 nt, Homo sapiens
  source 1..20: mol_type = genomic RNA
ctaagggaagaaacaaagtt

SEQ ID NO: 3050 - RNA, 20 nt, Homo sapiens
  source 1..20: mol_type = genomic RNA
taagggaagaaacaaagttg

SEQ ID NO: 3051 - RNA, 20 nt, Homo sapiens
  source 1..20: mol_type = genomic RNA
aagggaagaaacaaagttga

SEQ ID NO: 3052 - RNA, 20 nt, Homo sapiens
  source 1..20: mol_type = genomic RNA
agggaagaaacaaagttgaa

SEQ ID NO: 3053 - RNA, 20 nt, Homo sapiens
  source 1..20: mol_type = genomic RNA
gggaagaaacaaagttgaac

SEQ ID NO: 3054 - RNA, 20 nt, Homo sapiens
  source 1..20: mol_type = genomic RNA
ggaagaaacaaagttgaacc

SEQ ID NO: 3055 - RNA, 20 nt, Homo sapiens
  source 1..20: mol_type = genomic RNA
gaagaaacaaagttgaaccg

SEQ ID NO: 3056 - RNA, 20 nt, Homo sapiens
  source 1..20: mol_type = genomic RNA
aagaaacaaagttgaaccgt

SEQ ID NO: 3057 - RNA, 20 nt, Homo sapiens
  source 1..20: mol_type = genomic RNA
agaaacaaagttgaaccgtt

SEQ ID NO: 3058 - RNA, 20 nt, Homo sapiens
  source 1..20: mol_type = genomic RNA
gaaacaaagttgaaccgttt

SEQ ID NO: 3059 - RNA, 20 nt, Homo sapiens
  source 1..20: mol_type = genomic RNA
aaacaaagttgaaccgtttc

SEQ ID NO: 3060 - RNA, 20 nt, Homo sapiens
  source 1..20: mol_type = genomic RNA
aacaaagttgaaccgtttct

SEQ ID NO: 3061 - RNA, 20 nt, Homo sapiens
  source 1..20: mol_type = genomic RNA
acaaagttgaaccgtttctt

SEQ ID NO: 3062 - RNA, 20 nt, Homo sapiens
  source 1..20: mol_type = genomic RNA
caaagttgaaccgtttcttt

SEQ ID NO: 3063 - RNA, 20 nt, Homo sapiens
  source 1..20: mol_type = genomic RNA
aaagttgaaccgtttcttta

SEQ ID NO: 3064 - RNA, 20 nt, Homo sapiens
  source 1..20: mol_type = genomic RNA
aagttgaaccgtttctttaa

SEQ ID NO: 3065 - RNA, 20 nt, Homo sapiens
  source 1..20: mol_type = genomic RNA
agttgaaccgtttctttaat

SEQ ID NO: 3066 - RNA, 20 nt, Homo sapiens
  source 1..20: mol_type = genomic RNA
gttgaaccgtttctttaata

SEQ ID NO: 3067 - RNA, 20 nt, Homo sapiens
  source 1..20: mol_type = genomic RNA
ttgaaccgtttctttaataa

SEQ ID NO: 3068 - RNA, 20 nt, Homo sapiens
  source 1..20: mol_type = genomic RNA
agtcattgccgaggaaggct

SEQ ID NO: 3069 - RNA, 20 nt, Homo sapiens
  source 1..20: mol_type = genomic RNA
gtcattgccgaggaaggctt

SEQ ID NO: 3070 - RNA, 20 nt, Homo sapiens
  source 1..20: mol_type = genomic RNA
tcattgccgaggaaggcttg

SEQ ID NO: 3071 - RNA, 20 nt, Homo sapiens
  source 1..20: mol_type = genomic RNA
cattgccgaggaaggcttgc

SEQ ID NO: 3072 - RNA, 20 nt, Homo sapiens
  source 1..20: mol_type = genomic RNA
attgccgaggaaggcttgca

SEQ ID NO: 3073 - RNA, 20 nt, Homo sapiens
  source 1..20: mol_type = genomic RNA
ttgccgaggaaggcttgcac

SEQ ID NO: 3074 - RNA, 20 nt, Homo sapiens
  source 1..20: mol_type = genomic RNA
tgccgaggaaggcttgcaca

SEQ ID NO: 3075 - RNA, 20 nt, Homo sapiens
  source 1..20: mol_type = genomic RNA
gccgaggaaggcttgcacag

SEQ ID NO: 3076 - RNA, 20 nt, Homo sapiens
  source 1..20: mol_type = genomic RNA
ccgaggaaggcttgcacagg

SEQ ID NO: 3077 - RNA, 20 nt, Homo sapiens
  source 1..20: mol_type = genomic RNA
cgaggaaggcttgcacaggg

SEQ ID NO: 3078 - RNA, 20 nt, Homo sapiens
  source 1..20: mol_type = genomic RNA
gaggaaggcttgcacagggt

SEQ ID NO: 3079 - RNA, 20 nt, Homo sapiens
  source 1..20: mol_type = genomic RNA
aggaaggcttgcacagggtg

SEQ ID NO: 3080 - RNA, 20 nt, Homo sapiens
  source 1..20: mol_type = genomic RNA
ggaaggcttgcacagggtga

SEQ ID NO: 3081 - RNA, 20 nt, Homo sapiens
  source 1..20: mol_type = genomic RNA
gaaggcttgcacagggtgaa

SEQ ID NO: 3082 - RNA, 20 nt, Homo sapiens
  source 1..20: mol_type = genomic RNA
aaggcttgcacagggtgaaa

SEQ ID NO: 3083 - RNA, 20 nt, Homo sapiens
  source 1..20: mol_type = genomic RNA
aggcttgcacagggtgaaag

SEQ ID NO: 3084 - RNA, 20 nt, Homo sapiens
  source 1..20: mol_type = genomic RNA
ggcttgcacagggtgaaagc

SEQ ID NO: 3085 - RNA, 20 nt, Homo sapiens
  source 1..20: mol_type = genomic RNA
gcttgcacagggtgaaagct

SEQ ID NO: 3086 - RNA, 20 nt, Homo sapiens
  source 1..20: mol_type = genomic RNA
cttgcacagggtgaaagctt

SEQ ID NO: 3087 - RNA, 20 nt, Homo sapiens
  source 1..20: mol_type = genomic RNA
ttgcacagggtgaaagcttt

SEQ ID NO: 3088 - RNA, 20 nt, Homo sapiens
  source 1..20: mol_type = genomic RNA
tgcacagggtgaaagctttg

SEQ ID NO: 3089 - RNA, 20 nt, Homo sapiens
  source 1..20: mol_type = genomic RNA
gcacagggtgaaagctttgc

SEQ ID NO: 3090 - RNA, 20 nt, Homo sapiens
  source 1..20: mol_type = genomic RNA
cacagggtgaaagctttgct

SEQ ID NO: 3091 - RNA, 20 nt, Homo sapiens
  source 1..20: mol_type = genomic RNA
acagggtgaaagctttgctt

SEQ ID NO: 3092 - RNA, 20 nt, Homo sapiens
  source 1..20: mol_type = genomic RNA
cagggtgaaagctttgcttc

SEQ ID NO: 3093 - RNA, 20 nt, Homo sapiens
  source 1..20: mol_type = genomic RNA
agggtgaaagctttgcttct

SEQ ID NO: 3094 - RNA, 20 nt, Homo sapiens
  source 1..20: mol_type = genomic RNA
gggtgaaagctttgcttctc

SEQ ID NO: 3095 - RNA, 20 nt, Homo sapiens
  source 1..20: mol_type = genomic RNA
ggtgaaagctttgcttctct

SEQ ID NO: 3096 - RNA, 20 nt, Homo sapiens
  source 1..20: mol_type = genomic RNA
gtgaaagctttgcttctctg

SEQ ID NO: 3097 - RNA, 20 nt, Homo sapiens
  source 1..20: mol_type = genomic RNA
tgaaagctttgcttctctgc

SEQ ID NO: 3098 - RNA, 20 nt, Homo sapiens
  source 1..20: mol_type = genomic RNA
gaaagctttgcttctctgct

SEQ ID NO: 3099 - RNA, 20 nt, Homo sapiens
  source 1..20: mol_type = genomic RNA
aaagctttgcttctctgctg

SEQ ID NO: 3100 - RNA, 20 nt, Homo sapiens
  source 1..20: mol_type = genomic RNA
aagctttgcttctctgctgc

SEQ ID NO: 3101 - RNA, 20 nt, Homo sapiens
  source 1..20: mol_type = genomic RNA
agctttgcttctctgctgct

SEQ ID NO: 3102 - RNA, 20 nt, Homo sapiens
  source 1..20: mol_type = genomic RNA
gctttgcttctctgctgctg

SEQ ID NO: 3103 - RNA, 20 nt, Homo sapiens
  source 1..20: mol_type = genomic RNA
ctttgcttctctgctgctgt

SEQ ID NO: 3104 - RNA, 20 nt, Homo sapiens
  source 1..20: mol_type = genomic RNA
tttgcttctctgctgctgta

SEQ ID NO: 3105 - RNA, 20 nt, Homo sapiens
  source 1..20: mol_type = genomic RNA
ttgcttctctgctgctgtaa

SEQ ID NO: 3106 - RNA, 20 nt, Homo sapiens
  source 1..20: mol_type = genomic RNA
tgcttctctgctgctgtaac

SEQ ID NO: 3107 - RNA, 20 nt, Homo sapiens
  source 1..20: mol_type = genomic RNA
gcttctctgctgctgtaaca

SEQ ID NO: 3108 - RNA, 20 nt, Homo sapiens
  source 1..20: mol_type = genomic RNA
cttctctgctgctgtaacag

SEQ ID NO: 3109 - RNA, 20 nt, Homo sapiens
  source 1..20: mol_type = genomic RNA
ttctctgctgctgtaacagg

SEQ ID NO: 3110 - RNA, 20 nt, Homo sapiens
  source 1..20: mol_type = genomic RNA
tctctgctgctgtaacaggg

SEQ ID NO: 3111 - RNA, 20 nt, Homo sapiens
  source 1..20: mol_type = genomic RNA
ctctgctgctgtaacaggga

SEQ ID NO: 3112 - RNA, 20 nt, Homo sapiens
  source 1..20: mol_type = genomic RNA
tctgctgctgtaacagggac

SEQ ID NO: 3113 - RNA, 20 nt, Homo sapiens
  source 1..20: mol_type = genomic RNA
ctgctgctgtaacagggact

SEQ ID NO: 3114 - RNA, 20 nt, Homo sapiens
  source 1..20: mol_type = genomic RNA
tgctgctgtaacagggacta

SEQ ID NO: 3115 - RNA, 20 nt, Homo sapiens
  source 1..20: mol_type = genomic RNA
gctgctgtaacagggactag

SEQ ID NO: 3116 - RNA, 20 nt, Homo sapiens
  source 1..20: mol_type = genomic RNA
ctgctgtaacagggactagc

SEQ ID NO: 3117 - RNA, 20 nt, Homo sapiens
  source 1..20: mol_type = genomic RNA
tgctgtaacagggactagca

SEQ ID NO: 3118 - RNA, 20 nt, Homo sapiens
  source 1..20: mol_type = genomic RNA
gctgtaacagggactagcac

SEQ ID NO: 3119 - RNA, 20 nt, Homo sapiens
  source 1..20: mol_type = genomic RNA
ctgtaacagggactagcaca

SEQ ID NO: 3120 - RNA, 20 nt, Homo sapiens
  source 1..20: mol_type = genomic RNA
tgtaacagggactagcacag

SEQ ID NO: 3121 - RNA, 20 nt, Homo sapiens
  source 1..20: mol_type = genomic RNA
gtaacagggactagcacaga

SEQ ID NO: 3122 - RNA, 20 nt, Homo sapiens
  source 1..20: mol_type = genomic RNA
taacagggactagcacagac

SEQ ID NO: 3123 - RNA, 20 nt, Homo sapiens
  source 1..20: mol_type = genomic RNA
aacagggactagcacagaca

SEQ ID NO: 3124 - RNA, 20 nt, Homo sapiens
  source 1..20: mol_type = genomic RNA
acagggactagcacagacac

SEQ ID NO: 3125 - RNA, 20 nt, Homo sapiens
  source 1..20: mol_type = genomic RNA
cagggactagcacagacaca

SEQ ID NO: 3126 - RNA, 20 nt, Homo sapiens
  source 1..20: mol_type = genomic RNA
agggactagcacagacacac

SEQ ID NO: 3127 - RNA, 20 nt, Homo sapiens
  source 1..20: mol_type = genomic RNA
gggactagcacagacacacg

SEQ ID NO: 3128 - RNA, 20 nt, Homo sapiens
  source 1..20: mol_type = genomic RNA
ggactagcacagacacacgg

SEQ ID NO: 3129 - RNA, 20 nt, Homo sapiens
  source 1..20: mol_type = genomic RNA
gactagcacagacacacgga

SEQ ID NO: 3130 - RNA, 20 nt, Homo sapiens
  source 1..20: mol_type = genomic RNA
actagcacagacacacggat

SEQ ID NO: 3131 - RNA, 20 nt, Homo sapiens
  source 1..20: mol_type = genomic RNA
ctagcacagacacacggatg

SEQ ID NO: 3132 - RNA, 20 nt, Homo sapiens
  source 1..20: mol_type = genomic RNA
tagcacagacacacggatga

SEQ ID NO: 3133 - RNA, 20 nt, Homo sapiens
  source 1..20: mol_type = genomic RNA
agcacagacacacggatgag

SEQ ID NO: 3134 - RNA, 20 nt, Homo sapiens
  source 1..20: mol_type = genomic RNA
gcacagacacacggatgagt

SEQ ID NO: 3135 - RNA, 20 nt, Homo sapiens
  source 1..20: mol_type = genomic RNA
cacagacacacggatgagtg

SEQ ID NO: 3136 - RNA, 20 nt, Homo sapiens
  source 1..20: mol_type = genomic RNA
acagacacacggatgagtgg

SEQ ID NO: 3137 - RNA, 20 nt, Homo sapiens
  source 1..20: mol_type = genomic RNA
cagacacacggatgagtggg

SEQ ID NO: 3138 - RNA, 20 nt, Homo sapiens
  source 1..20: mol_type = genomic RNA
agacacacggatgagtgggg

SEQ ID NO: 3139 - RNA, 20 nt, Homo sapiens
  source 1..20: mol_type = genomic RNA
gacacacggatgagtggggt

SEQ ID NO: 3140 - RNA, 20 nt, Homo sapiens
  source 1..20: mol_type = genomic RNA
acacacggatgagtggggtc

SEQ ID NO: 3141 - RNA, 20 nt, Homo sapiens
  source 1..20: mol_type = genomic RNA
cacacggatgagtggggtca

SEQ ID NO: 3142 - RNA, 20 nt, Homo sapiens
  source 1..20: mol_type = genomic RNA
acacggatgagtggggtcat

SEQ ID NO: 3143 - RNA, 20 nt, Homo sapiens
  source 1..20: mol_type = genomic RNA
cacggatgagtggggtcatt

SEQ ID NO: 3144 - RNA, 20 nt, Homo sapiens
  source 1..20: mol_type = genomic RNA
acggatgagtggggtcattt

SEQ ID NO: 3145 - RNA, 20 nt, Homo sapiens
  source 1..20: mol_type = genomic RNA
cggatgagtggggtcatttc

SEQ ID NO: 3146 - RNA, 20 nt, Homo sapiens
  source 1..20: mol_type = genomic RNA
ggatgagtggggtcatttcc

SEQ ID NO: 3147 - RNA, 20 nt, Homo sapiens
  source 1..20: mol_type = genomic RNA
gatgagtggggtcatttcca

SEQ ID NO: 3148 - RNA, 20 nt, Homo sapiens
  source 1..20: mol_type = genomic RNA
atgagtggggtcatttccag

SEQ ID NO: 3149 - RNA, 20 nt, Homo sapiens
  source 1..20: mol_type = genomic RNA
tgagtggggtcatttccaga

SEQ ID NO: 3150 - RNA, 20 nt, Homo sapiens
  source 1..20: mol_type = genomic RNA
gagtggggtcatttccagat

SEQ ID NO: 3151 - RNA, 20 nt, Homo sapiens
  source 1..20: mol_type = genomic RNA
agtggggtcatttccagata

SEQ ID NO: 3152 - RNA, 20 nt, Homo sapiens
  source 1..20: mol_type = genomic RNA
gtggggtcatttccagatat

SEQ ID NO: 3153 - RNA, 20 nt, Homo sapiens
  source 1..20: mol_type = genomic RNA
tggggtcatttccagatatt

SEQ ID NO: 3154 - RNA, 20 nt, Homo sapiens
  source 1..20: mol_type = genomic RNA
ggggtcatttccagatatta

SEQ ID NO: 3155 - RNA, 20 nt, Homo sapiens
  source 1..20: mol_type = genomic RNA
gggtcatttccagatattag

SEQ ID NO: 3156 - RNA, 20 nt, Homo sapiens
  source 1..20: mol_type = genomic RNA
ggtcatttccagatattagg

SEQ ID NO: 3157 - RNA, 20 nt, Homo sapiens
  source 1..20: mol_type = genomic RNA
gtcatttccagatattaggt

SEQ ID NO: 3158 - RNA, 20 nt, Homo sapiens
  source 1..20: mol_type = genomic RNA
tcatttccagatattaggtc

SEQ ID NO: 3159 - RNA, 20 nt, Homo sapiens
  source 1..20: mol_type = genomic RNA
catttccagatattaggtca

SEQ ID NO: 3160 - RNA, 20 nt, Homo sapiens
  source 1..20: mol_type = genomic RNA
atttccagatattaggtcac

SEQ ID NO: 3161 - RNA, 20 nt, Homo sapiens
  source 1..20: mol_type = genomic RNA
tttccagatattaggtcaca

SEQ ID NO: 3162 - RNA, 20 nt, Homo sapiens
  source 1..20: mol_type = genomic RNA
ttccagatattaggtcacag

SEQ ID NO: 3163 - RNA, 20 nt, Homo sapiens
  source 1..20: mol_type = genomic RNA
tccagatattaggtcacagc

SEQ ID NO: 3164 - RNA, 20 nt, Homo sapiens
  source 1..20: mol_type = genomic RNA
ccagatattaggtcacagca

SEQ ID NO: 3165 - RNA, 20 nt, Homo sapiens
  source 1..20: mol_type = genomic RNA
cagatattaggtcacagcag

SEQ ID NO: 3166 - RNA, 20 nt, Homo sapiens
  source 1..20: mol_type = genomic RNA
agatattaggtcacagcaga

SEQ ID NO: 3167 - RNA, 20 nt, Homo sapiens
  source 1..20: mol_type = genomic RNA
gatattaggtcacagcagaa

SEQ ID NO: 3168 - RNA, 20 nt, Homo sapiens
  source 1..20: mol_type = genomic RNA
atattaggtcacagcagaag

SEQ ID NO: 3169 - RNA, 20 nt, Homo sapiens
  source 1..20: mol_type = genomic RNA
tattaggtcacagcagaagc

SEQ ID NO: 3170 - RNA, 20 nt, Homo sapiens
  source 1..20: mol_type = genomic RNA
attaggtcacagcagaagca

SEQ ID NO: 3171 - RNA, 20 nt, Homo sapiens
  source 1..20: mol_type = genomic RNA
ttaggtcacagcagaagcag

SEQ ID NO: 3172 - RNA, 20 nt, Homo sapiens
  source 1..20: mol_type = genomic RNA
taggtcacagcagaagcagc

SEQ ID NO: 3173 - RNA, 20 nt, Homo sapiens
  source 1..20: mol_type = genomic RNA
aggtcacagcagaagcagcc

SEQ ID NO: 3174 - RNA, 20 nt, Homo sapiens
  source 1..20: mol_type = genomic RNA
ggtcacagcagaagcagcca

SEQ ID NO: 3175 - RNA, 20 nt, Homo sapiens
  source 1..20: mol_type = genomic RNA
gtcacagcagaagcagccaa

SEQ ID NO: 3176 - RNA, 20 nt, Homo sapiens
  source 1..20: mol_type = genomic RNA
tcacagcagaagcagccaaa

SEQ ID NO: 3177 - RNA, 20 nt, Homo sapiens
  source 1..20: mol_type = genomic RNA
cacagcagaagcagccaaaa

SEQ ID NO: 3178 - RNA, 20 nt, Homo sapiens
  source 1..20: mol_type = genomic RNA
acagcagaagcagccaaaat

SEQ ID NO: 3179 - RNA, 20 nt, Homo sapiens
  source 1..20: mol_type = genomic RNA
cagcagaagcagccaaaatg

SEQ ID NO: 3180 - RNA, 20 nt, Homo sapiens
  source 1..20: mol_type = genomic RNA
agcagaagcagccaaaatgg

SEQ ID NO: 3181 - RNA, 20 nt, Homo sapiens
  source 1..20: mol_type = genomic RNA
gcagaagcagccaaaatgga

SEQ ID NO: 3182 - RNA, 20 nt, Homo sapiens
  source 1..20: mol_type = genomic RNA
cagaagcagccaaaatggat

SEQ ID NO: 3183 - RNA, 20 nt, Homo sapiens
  source 1..20: mol_type = genomic RNA
agaagcagccaaaatggatc

SEQ ID NO: 3184 - RNA, 20 nt, Homo sapiens
  source 1..20: mol_type = genomic RNA
gaagcagccaaaatggatcc

SEQ ID NO: 3185 - RNA, 20 nt, Homo sapiens
  source 1..20: mol_type = genomic RNA
aagcagccaaaatggatccc

SEQ ID NO: 3186 - RNA, 20 nt, Homo sapiens
  source 1..20: mol_type = genomic RNA
agcagccaaaatggatcccc

SEQ ID NO: 3187 - RNA, 20 nt, Homo sapiens
  source 1..20: mol_type = genomic RNA
gcagccaaaatggatcccca

SEQ ID NO: 3188 - RNA, 20 nt, Homo sapiens
  source 1..20: mol_type = genomic RNA
cagccaaaatggatccccag

SEQ ID NO: 3189 - RNA, 20 nt, Homo sapiens
  source 1..20: mol_type = genomic RNA
agccaaaatggatccccagt

SEQ ID NO: 3190 - RNA, 20 nt, Homo sapiens
  source 1..20: mol_type = genomic RNA
gccaaaatggatccccagtg

SEQ ID NO: 3191 - RNA, 20 nt, Homo sapiens
  source 1..20: mol_type = genomic RNA
ccaaaatggatccccagtgc

SEQ ID NO: 3192 - RNA, 20 nt, Homo sapiens
  source 1..20: mol_type = genomic RNA
caaaatggatccccagtgca

SEQ ID NO: 3193 - RNA, 20 nt, Homo sapiens
  source 1..20: mol_type = genomic RNA
aaaatggatccccagtgcac

SEQ ID NO: 3194 - RNA, 20 nt, Homo sapiens
  source 1..20: mol_type = genomic RNA
aaatggatccccagtgcact

SEQ ID NO: 3195 - RNA, 20 nt, Homo sapiens
  source 1..20: mol_type = genomic RNA
aatggatccccagtgcacta

SEQ ID NO: 3196 - RNA, 20 nt, Homo sapiens
  source 1..20: mol_type = genomic RNA
atggatccccagtgcactat

SEQ ID NO: 3197 - RNA, 20 nt, Homo sapiens
  source 1..20: mol_type = genomic RNA
tggatccccagtgcactatg

SEQ ID NO: 3198 - RNA, 20 nt, Homo sapiens
  source 1..20: mol_type = genomic RNA
ggatccccagtgcactatgg

SEQ ID NO: 3199 - RNA, 20 nt, Homo sapiens
  source 1..20: mol_type = genomic RNA
gatccccagtgcactatggg

SEQ ID NO: 3200 - RNA, 20 nt, Homo sapiens
  source 1..20: mol_type = genomic RNA
atccccagtgcactatggga

SEQ ID NO: 3201 - RNA, 20 nt, Homo sapiens
  source 1..20: mol_type = genomic RNA
tccccagtgcactatgggac

SEQ ID NO: 3202 - RNA, 20 nt, Homo sapiens
  source 1..20: mol_type = genomic RNA
ccccagtgcactatgggact

SEQ ID NO: 3203 - RNA, 20 nt, Homo sapiens
  source 1..20: mol_type = genomic RNA
cccagtgcactatgggactg

SEQ ID NO: 3204 - RNA, 20 nt, Homo sapiens
  source 1..20: mol_type = genomic RNA
ccagtgcactatgggactga

SEQ ID NO: 3205 - RNA, 20 nt, Homo sapiens
  source 1..20: mol_type = genomic RNA
cagtgcactatgggactgag

SEQ ID NO: 3206 - RNA, 20 nt, Homo sapiens
  source 1..20: mol_type = genomic RNA
agtgcactatgggactgagt

SEQ ID NO: 3207 - RNA, 20 nt, Homo sapiens
  source 1..20: mol_type = genomic RNA
gtgcactatgggactgagta

SEQ ID NO: 3208 - RNA, 20 nt, Homo sapiens
  source 1..20: mol_type = genomic RNA
tgcactatgggactgagtaa

SEQ ID NO: 3209 - RNA, 20 nt, Homo sapiens
  source 1..20: mol_type = genomic RNA
gcactatgggactgagtaac

SEQ ID NO: 3210 - RNA, 20 nt, Homo sapiens
  source 1..20: mol_type = genomic RNA
cactatgggactgagtaaca

SEQ ID NO: 3211 - RNA, 20 nt, Homo sapiens
  source 1..20: mol_type = genomic RNA
actatgggactgagtaacat

SEQ ID NO: 3212 - RNA, 20 nt, Homo sapiens
  source 1..20: mol_type = genomic RNA
ctatgggactgagtaacatt

SEQ ID NO: 3213 - RNA, 20 nt, Homo sapiens
  source 1..20: mol_type = genomic RNA
tatgggactgagtaacattc

SEQ ID NO: 3214 - RNA, 20 nt, Homo sapiens
  source 1..20: mol_type = genomic RNA
atgggactgagtaacattct

SEQ ID NO: 3215 - RNA, 20 nt, Homo sapiens
  source 1..20: mol_type = genomic RNA
tgggactgagtaacattctc

SEQ ID NO: 3216 - RNA, 20 nt, Homo sapiens
  source 1..20: mol_type = genomic RNA
gggactgagtaacattctct

SEQ ID NO: 3217 - RNA, 20 nt, Homo sapiens
  source 1..20: mol_type = genomic RNA
ggactgagtaacattctctt

SEQ ID NO: 3218 - RNA, 20 nt, Homo sapiens
  source 1..20: mol_type = genomic RNA
gactgagtaacattctcttt

SEQ ID NO: 3219 - RNA, 20 nt, Homo sapiens
  source 1..20: mol_type = genomic RNA
actgagtaacattctctttg

SEQ ID NO: 3220 - RNA, 20 nt, Homo sapiens
  source 1..20: mol_type = genomic RNA
ctgagtaacattctctttgt

SEQ ID NO: 3221 - RNA, 20 nt, Homo sapiens
  source 1..20: mol_type = genomic RNA
tgagtaacattctctttgtg

SEQ ID NO: 3222 - RNA, 20 nt, Homo sapiens
  source 1..20: mol_type = genomic RNA
gagtaacattctctttgtga

SEQ ID NO: 3223 - RNA, 20 nt, Homo sapiens
  source 1..20: mol_type = genomic RNA
agtaacattctctttgtgat

SEQ ID NO: 3224 - RNA, 20 nt, Homo sapiens
  source 1..20: mol_type = genomic RNA
gtaacattctctttgtgatg

SEQ ID NO: 3225 - RNA, 20 nt, Homo sapiens
  source 1..20: mol_type = genomic RNA
taacattctctttgtgatgg

SEQ ID NO: 3226 - RNA, 20 nt, Homo sapiens
  source 1..20: mol_type = genomic RNA
aacattctctttgtgatggc

SEQ ID NO: 3227 - RNA, 20 nt, Homo sapiens
  source 1..20: mol_type = genomic RNA
acattctctttgtgatggcc

SEQ ID NO: 3228 - RNA, 20 nt, Homo sapiens
  source 1..20: mol_type = genomic RNA
cattctctttgtgatggcct

SEQ ID NO: 3229 - RNA, 20 nt, Homo sapiens
  source 1..20: mol_type = genomic RNA
attctctttgtgatggcctt

SEQ ID NO: 3230 - RNA, 20 nt, Homo sapiens
  source 1..20: mol_type = genomic RNA
ttctctttgtgatggccttc

SEQ ID NO: 3231 - RNA, 20 nt, Homo sapiens
  source 1..20: mol_type = genomic RNA
tctctttgtgatggccttcc

SEQ ID NO: 3232 - RNA, 20 nt, Homo sapiens
  source 1..20: mol_type = genomic RNA
ctctttgtgatggccttcct

SEQ ID NO: 3233 - RNA, 20 nt, Homo sapiens
  source 1..20: mol_type = genomic RNA
tctttgtgatggccttcctg

SEQ ID NO: 3234 - RNA, 20 nt, Homo sapiens
  source 1..20: mol_type = genomic RNA
ctttgtgatggccttcctgc

SEQ ID NO: 3235 - RNA, 20 nt, Homo sapiens
  source 1..20: mol_type = genomic RNA
tttgtgatggccttcctgct

SEQ ID NO: 3236 - RNA, 20 nt, Homo sapiens
  source 1..20: mol_type = genomic RNA
ttgtgatggccttcctgctc

SEQ ID NO: 3237 - RNA, 20 nt, Homo sapiens
  source 1..20: mol_type = genomic RNA
tgtgatggccttcctgctct

SEQ ID NO: 3238 - RNA, 20 nt, Homo sapiens
  source 1..20: mol_type = genomic RNA
gtgatggccttcctgctctc

SEQ ID NO: 3239 - RNA, 20 nt, Homo sapiens
  source 1..20: mol_type = genomic RNA
tgatggccttcctgctctct

SEQ ID NO: 3240 - RNA, 20 nt, Homo sapiens
  source 1..20: mol_type = genomic RNA
gatggccttcctgctctctg

SEQ ID NO: 3241 - RNA, 20 nt, Homo sapiens
  source 1..20: mol_type = genomic RNA
atggccttcctgctctctgg

SEQ ID NO: 3242 - RNA, 20 nt, Homo sapiens
  source 1..20: mol_type = genomic RNA
tggccttcctgctctctggt

SEQ ID NO: 3243 - RNA, 20 nt, Homo sapiens
  source 1..20: mol_type = genomic RNA
ggccttcctgctctctggtg

SEQ ID NO: 3244 - RNA, 20 nt, Homo sapiens
  source 1..20: mol_type = genomic RNA
gccttcctgctctctggtgc

SEQ ID NO: 3245 - RNA, 20 nt, Homo sapiens
  source 1..20: mol_type = genomic RNA
ccttcctgctctctggtgct

SEQ ID NO: 3246 - RNA, 20 nt, Homo sapiens
  source 1..20: mol_type = genomic RNA
cttcctgctctctggtgctg

SEQ ID NO: 3247 - RNA, 20 nt, Homo sapiens
  source 1..20: mol_type = genomic RNA
ttcctgctctctggtgctgc

SEQ ID NO: 3248 - RNA, 20 nt, Homo sapiens
  source 1..20: mol_type = genomic RNA
tcctgctctctggtgctgct

SEQ ID NO: 3249 - RNA, 20 nt, Homo sapiens
  source 1..20: mol_type = genomic RNA
cctgctctctggtgctgctc

SEQ ID NO: 3250 - RNA, 20 nt, Homo sapiens
  source 1..20: mol_type = genomic RNA
ctgctctctggtgctgctcc

SEQ ID NO: 3251 - RNA, 20 nt, Homo sapiens
  source 1..20: mol_type = genomic RNA
tgctctctggtgctgctcct

SEQ ID NO: 3252 - RNA, 20 nt, Homo sapiens
  source 1..20: mol_type = genomic RNA
gctctctggtgctgctcctc

SEQ ID NO: 3253 - RNA, 20 nt, Homo sapiens
  source 1..20: mol_type = genomic RNA
ctctctggtgctgctcctct

SEQ ID NO: 3254 - RNA, 20 nt, Homo sapiens
  source 1..20: mol_type = genomic RNA
tctctggtgctgctcctctg

SEQ ID NO: 3255 - RNA, 20 nt, Homo sapiens
  source 1..20: mol_type = genomic RNA
ctctggtgctgctcctctga

SEQ ID NO: 3256 - RNA, 20 nt, Homo sapiens
  source 1..20: mol_type = genomic RNA
tctggtgctgctcctctgaa

SEQ ID NO: 3257 - RNA, 20 nt, Homo sapiens
  source 1..20: mol_type = genomic RNA
ctggtgctgctcctctgaag

SEQ ID NO: 3258 - RNA, 20 nt, Homo sapiens
  source 1..20: mol_type = genomic RNA
tggtgctgctcctctgaaga

SEQ ID NO: 3259 - RNA, 20 nt, Homo sapiens
  source 1..20: mol_type = genomic RNA
ggtgctgctcctctgaagat

SEQ ID NO: 3260 - RNA, 20 nt, Homo sapiens
  source 1..20: mol_type = genomic RNA
gtgctgctcctctgaagatt

SEQ ID NO: 3261 - RNA, 20 nt, Homo sapiens
  source 1..20: mol_type = genomic RNA
tgctgctcctctgaagattc

SEQ ID NO: 3262 - RNA, 20 nt, Homo sapiens
  source 1..20: mol_type = genomic RNA
gctgctcctctgaagattca

SEQ ID NO: 3263 - RNA, 20 nt, Homo sapiens
  source 1..20: mol_type = genomic RNA
ctgctcctctgaagattcaa

SEQ ID NO: 3264 - RNA, 20 nt, Homo sapiens
  source 1..20: mol_type = genomic RNA
tgctcctctgaagattcaag

SEQ ID NO: 3265 - RNA, 20 nt, Homo sapiens
  source 1..20: mol_type = genomic RNA
gctcctctgaagattcaagc

SEQ ID NO: 3266 - RNA, 20 nt, Homo sapiens
  source 1..20: mol_type = genomic RNA
ctcctctgaagattcaagct

SEQ ID NO: 3267 - RNA, 20 nt, Homo sapiens
  source 1..20: mol_type = genomic RNA
tcctctgaagattcaagctt

SEQ ID NO: 3268 - RNA, 20 nt, Homo sapiens
  source 1..20: mol_type = genomic RNA
cctctgaagattcaagctta

SEQ ID NO: 3269 - RNA, 20 nt, Homo sapiens
  source 1..20: mol_type = genomic RNA
ctctgaagattcaagcttat

SEQ ID NO: 3270 - RNA, 20 nt, Homo sapiens
  source 1..20: mol_type = genomic RNA
tctgaagattcaagcttatt

SEQ ID NO: 3271 - RNA, 20 nt, Homo sapiens
  source 1..20: mol_type = genomic RNA
ctgaagattcaagcttattt

SEQ ID NO: 3272 - RNA, 20 nt, Homo sapiens
  source 1..20: mol_type = genomic RNA
tgaagattcaagcttatttc

SEQ ID NO: 3273 - RNA, 20 nt, Homo sapiens
  source 1..20: mol_type = genomic RNA
gaagattcaagcttatttca

SEQ ID NO: 3274 - RNA, 20 nt, Homo sapiens
  source 1..20: mol_type = genomic RNA
aagattcaagcttatttcaa

SEQ ID NO: 3275 - RNA, 20 nt, Homo sapiens
  source 1..20: mol_type = genomic RNA
agattcaagcttatttcaat

SEQ ID NO: 3276 - RNA, 20 nt, Homo sapiens
  source 1..20: mol_type = genomic RNA
gattcaagcttatttcaatg

SEQ ID NO: 3277 - RNA, 20 nt, Homo sapiens
  source 1..20: mol_type = genomic RNA
attcaagcttatttcaatga

SEQ ID NO: 3278 - RNA, 20 nt, Homo sapiens
  source 1..20: mol_type = genomic RNA
ttcaagcttatttcaatgag

SEQ ID NO: 3279 - RNA, 20 nt, Homo sapiens
  source 1..20: mol_type = genomic RNA
tcaagcttatttcaatgaga

SEQ ID NO: 3280 - RNA, 20 nt, Homo sapiens
  source 1..20: mol_type = genomic RNA
caagcttatttcaatgagac

SEQ ID NO: 3281 - RNA, 20 nt, Homo sapiens
  source 1..20: mol_type = genomic RNA
aagcttatttcaatgagact

SEQ ID NO: 3282 - RNA, 20 nt, Homo sapiens
  source 1..20: mol_type = genomic RNA
agcttatttcaatgagactg

SEQ ID NO: 3283 - RNA, 20 nt, Homo sapiens
  source 1..20: mol_type = genomic RNA
gcttatttcaatgagactgc

SEQ ID NO: 3284 - RNA, 20 nt, Homo sapiens
  source 1..20: mol_type = genomic RNA
cttatttcaatgagactgca

SEQ ID NO: 3285 - RNA, 20 nt, Homo sapiens
  source 1..20: mol_type = genomic RNA
ttatttcaatgagactgcag

SEQ ID NO: 3286 - RNA, 20 nt, Homo sapiens
  source 1..20: mol_type = genomic RNA
tatttcaatgagactgcaga

SEQ ID NO: 3287 - RNA, 20 nt, Homo sapiens
  source 1..20: mol_type = genomic RNA
atttcaatgagactgcagac

SEQ ID NO: 3288 - RNA, 20 nt, Homo sapiens
  source 1..20: mol_type = genomic RNA
tttcaatgagactgcagacc

SEQ ID NO: 3289 - RNA, 20 nt, Homo sapiens
  source 1..20: mol_type = genomic RNA
ttcaatgagactgcagacct

SEQ ID NO: 3290 - RNA, 20 nt, Homo sapiens
  source 1..20: mol_type = genomic RNA
tcaatgagactgcagacctg

SEQ ID NO: 3291 - RNA, 20 nt, Homo sapiens
  source 1..20: mol_type = genomic RNA
caatgagactgcagacctgc

SEQ ID NO: 3292 - RNA, 20 nt, Homo sapiens
  source 1..20: mol_type = genomic RNA
aatgagactgcagacctgcc

SEQ ID NO: 3293 - RNA, 20 nt, Homo sapiens
  source 1..20: mol_type = genomic RNA
atgagactgcagacctgcca

SEQ ID NO: 3294 - RNA, 20 nt, Homo sapiens
  source 1..20: mol_type = genomic RNA
tgagactgcagacctgccat

SEQ ID NO: 3295 - RNA, 20 nt, Homo sapiens
  source 1..20: mol_type = genomic RNA
gagactgcagacctgccatg

SEQ ID NO: 3296 - RNA, 20 nt, Homo sapiens
  source 1..20: mol_type = genomic RNA
agactgcagacctgccatgc

SEQ ID NO: 3297 - RNA, 20 nt, Homo sapiens
  source 1..20: mol_type = genomic RNA
gactgcagacctgccatgcc

SEQ ID NO: 3298 - RNA, 20 nt, Homo sapiens
  source 1..20: mol_type = genomic RNA
actgcagacctgccatgcca

SEQ ID NO: 3299 - RNA, 20 nt, Homo sapiens
  source 1..20: mol_type = genomic RNA
ctgcagacctgccatgccaa

SEQ ID NO: 3300 - RNA, 20 nt, Homo sapiens
  source 1..20: mol_type = genomic RNA
tgcagacctgccatgccaat

SEQ ID NO: 3301 - RNA, 20 nt, Homo sapiens
  source 1..20: mol_type = genomic RNA
gcagacctgccatgccaatt

SEQ ID NO: 3302 - RNA, 20 nt, Homo sapiens
  source 1..20: mol_type = genomic RNA
cagacctgccatgccaattt

SEQ ID NO: 3303 - RNA, 20 nt, Homo sapiens
  source 1..20: mol_type = genomic RNA
agacctgccatgccaatttg

SEQ ID NO: 3304 - RNA, 20 nt, Homo sapiens
  source 1..20: mol_type = genomic RNA
gacctgccatgccaatttgc

SEQ ID NO: 3305 - RNA, 20 nt, Homo sapiens
  source 1..20: mol_type = genomic RNA
acctgccatgccaatttgca

SEQ ID NO: 3306 - RNA, 20 nt, Homo sapiens
  source 1..20: mol_type = genomic RNA
cctgccatgccaatttgcaa

SEQ ID NO: 3307 - RNA, 20 nt, Homo sapiens
  source 1..20: mol_type = genomic RNA
ctgccatgccaatttgcaaa

SEQ ID NO: 3308 - RNA, 20 nt, Homo sapiens
  source 1..20: mol_type = genomic RNA
tgccatgccaatttgcaaac

SEQ ID NO: 3309 - RNA, 20 nt, Homo sapiens
  source 1..20: mol_type = genomic RNA
gccatgccaatttgcaaact

SEQ ID NO: 3310 - RNA, 20 nt, Homo sapiens
  source 1..20: mol_type = genomic RNA
ccatgccaatttgcaaactc

SEQ ID NO: 3311 - RNA, 20 nt, Homo sapiens
  source 1..20: mol_type = genomic RNA
catgccaatttgcaaactct

SEQ ID NO: 3312 - RNA, 20 nt, Homo sapiens
  source 1..20: mol_type = genomic RNA
atgccaatttgcaaactctc

SEQ ID NO: 3313 - RNA, 20 nt, Homo sapiens
  source 1..20: mol_type = genomic RNA
tgccaatttgcaaactctca

SEQ ID NO: 3314 - RNA, 20 nt, Homo sapiens
  source 1..20: mol_type = genomic RNA
gccaatttgcaaactctcaa

SEQ ID NO: 3315 - RNA, 20 nt, Homo sapiens
  source 1..20: mol_type = genomic RNA
ccaatttgcaaactctcaaa

SEQ ID NO: 3316 - RNA, 20 nt, Homo sapiens
  source 1..20: mol_type = genomic RNA
caatttgcaaactctcaaaa

SEQ ID NO: 3317 - RNA, 20 nt, Homo sapiens
  source 1..20: mol_type = genomic RNA
aatttgcaaactctcaaaac

SEQ ID NO: 3318 - RNA, 20 nt, Homo sapiens
  source 1..20: mol_type = genomic RNA
atttgcaaactctcaaaacc

SEQ ID NO: 3319 - RNA, 20 nt, Homo sapiens
  source 1..20: mol_type = genomic RNA
tttgcaaactctcaaaacca

SEQ ID NO: 3320 - RNA, 20 nt, Homo sapiens
  source 1..20: mol_type = genomic RNA
ttgcaaactctcaaaaccaa

SEQ ID NO: 3321 - RNA, 20 nt, Homo sapiens
  source 1..20: mol_type = genomic RNA
tgcaaactctcaaaaccaaa

SEQ ID NO: 3322 - RNA, 20 nt, Homo sapiens
  source 1..20: mol_type = genomic RNA
gcaaactctcaaaaccaaag

SEQ ID NO: 3323 - RNA, 20 nt, Homo sapiens
  source 1..20: mol_type = genomic RNA
caaactctcaaaaccaaagc

SEQ ID NO: 3324 - RNA, 20 nt, Homo sapiens
  source 1..20: mol_type = genomic RNA
aaactctcaaaaccaaagcc

SEQ ID NO: 3325 - RNA, 20 nt, Homo sapiens
  source 1..20: mol_type = genomic RNA
aactctcaaaaccaaagcct

SEQ ID NO: 3326 - RNA, 20 nt, Homo sapiens
  source 1..20: mol_type = genomic RNA
actctcaaaaccaaagcctg

SEQ ID NO: 3327 - RNA, 20 nt, Homo sapiens
  source 1..20: mol_type = genomic RNA
ctctcaaaaccaaagcctga

SEQ ID NO: 3328 - RNA, 20 nt, Homo sapiens
  source 1..20: mol_type = genomic RNA
tctcaaaaccaaagcctgag

SEQ ID NO: 3329 - RNA, 20 nt, Homo sapiens
  source 1..20: mol_type = genomic RNA
ctcaaaaccaaagcctgagt

SEQ ID NO: 3330 - RNA, 20 nt, Homo sapiens
  source 1..20: mol_type = genomic RNA
tcaaaaccaaagcctgagtg

SEQ ID NO: 3331 - RNA, 20 nt, Homo sapiens
  source 1..20: mol_type = genomic RNA
caaaaccaaagcctgagtga

SEQ ID NO: 3332 - RNA, 20 nt, Homo sapiens
  source 1..20: mol_type = genomic RNA
aaaaccaaagcctgagtgag

SEQ ID NO: 3333 - RNA, 20 nt, Homo sapiens
  source 1..20: mol_type = genomic RNA
aaaccaaagcctgagtgagc

SEQ ID NO: 3334 - RNA, 20 nt, Homo sapiens
  source 1..20: mol_type = genomic RNA
aaccaaagcctgagtgagct

SEQ ID NO: 3335 - RNA, 20 nt, Homo sapiens
  source 1..20: mol_type = genomic RNA
accaaagcctgagtgagcta

SEQ ID NO: 3336 - RNA, 20 nt, Homo sapiens
  source 1..20: mol_type = genomic RNA
ccaaagcctgagtgagctag

SEQ ID NO: 3337 - RNA, 20 nt, Homo sapiens
  source 1..20: mol_type = genomic RNA
caaagcctgagtgagctagt

SEQ ID NO: 3338 - RNA, 20 nt, Homo sapiens
  source 1..20: mol_type = genomic RNA
aaagcctgagtgagctagta

SEQ ID NO: 3339 - RNA, 20 nt, Homo sapiens
  source 1..20: mol_type = genomic RNA
aagcctgagtgagctagtag

SEQ ID NO: 3340 - RNA, 20 nt, Homo sapiens
  source 1..20: mol_type = genomic RNA
agcctgagtgagctagtagt

SEQ ID NO: 3341 - RNA, 20 nt, Homo sapiens
  source 1..20: mol_type = genomic RNA
gcctgagtgagctagtagta

SEQ ID NO: 3342 - RNA, 20 nt, Homo sapiens
  source 1..20: mol_type = genomic RNA
cctgagtgagctagtagtat

SEQ ID NO: 3343 - RNA, 20 nt, Homo sapiens
  source 1..20: mol_type = genomic RNA
ctgagtgagctagtagtatt

SEQ ID NO: 3344 - RNA, 20 nt, Homo sapiens
  source 1..20: mol_type = genomic RNA
tgagtgagctagtagtattt

SEQ ID NO: 3345 - RNA, 20 nt, Homo sapiens
  source 1..20: mol_type = genomic RNA
gagtgagctagtagtatttt

SEQ ID NO: 3346 - RNA, 20 nt, Homo sapiens
  source 1..20: mol_type = genomic RNA
agtgagctagtagtattttg

SEQ ID NO: 3347 - RNA, 20 nt, Homo sapiens
  source 1..20: mol_type = genomic RNA
gtgagctagtagtattttgg

SEQ ID NO: 3348 - RNA, 20 nt, Homo sapiens
  source 1..20: mol_type = genomic RNA
tgagctagtagtattttggc

SEQ ID NO: 3349 - RNA, 20 nt, Homo sapiens
  source 1..20: mol_type = genomic RNA
gagctagtagtattttggca

SEQ ID NO: 3350 - RNA, 20 nt, Homo sapiens
  source 1..20: mol_type = genomic RNA
agctagtagtattttggcag

SEQ ID NO: 3351 - RNA, 20 nt, Homo sapiens
  source 1..20: mol_type = genomic RNA
gctagtagtattttggcagg

SEQ ID NO: 3352 - RNA, 20 nt, Homo sapiens
  source 1..20: mol_type = genomic RNA
ctagtagtattttggcagga

SEQ ID NO: 3353 - RNA, 20 nt, Homo sapiens
  source 1..20: mol_type = genomic RNA
tagtagtattttggcaggac

SEQ ID NO: 3354 - RNA, 20 nt, Homo sapiens
  source 1..20: mol_type = genomic RNA
agtagtattttggcaggacc

SEQ ID NO: 3355 - RNA, 20 nt, Homo sapiens
  source 1..20: mol_type = genomic RNA
gtagtattttggcaggacca

SEQ ID NO: 3356 - RNA, 20 nt, Homo sapiens
  source 1..20: mol_type = genomic RNA
tagtattttggcaggaccag

SEQ ID NO: 3357 - RNA, 20 nt, Homo sapiens
  source 1..20: mol_type = genomic RNA
agtattttggcaggaccagg

SEQ ID NO: 3358 - RNA, 20 nt, Homo sapiens
  source 1..20: mol_type = genomic RNA
gtattttggcaggaccagga

SEQ ID NO: 3359 - RNA, 20 nt, Homo sapiens
  source 1..20: mol_type = genomic RNA
tattttggcaggaccaggaa

SEQ ID NO: 3360 - RNA, 20 nt, Homo sapiens
  source 1..20: mol_type = genomic RNA
attttggcaggaccaggaaa

SEQ ID NO: 3361 - RNA, 20 nt, Homo sapiens
  source 1..20: mol_type = genomic RNA
ttttggcaggaccaggaaaa

SEQ ID NO: 3362 - RNA, 20 nt, Homo sapiens
  source 1..20: mol_type = genomic RNA
tttggcaggaccaggaaaac

SEQ ID NO: 3363 - RNA, 20 nt, Homo sapiens
  source 1..20: mol_type = genomic RNA
ttggcaggaccaggaaaact

SEQ ID NO: 3364 - RNA, 20 nt, Homo sapiens
  source 1..20: mol_type = genomic RNA
tggcaggaccaggaaaactt

SEQ ID NO: 3365 - RNA, 20 nt, Homo sapiens
  source 1..20: mol_type = genomic RNA
ggcaggaccaggaaaacttg

SEQ ID NO: 3366 - RNA, 20 nt, Homo sapiens
  source 1..20: mol_type = genomic RNA
gcaggaccaggaaaacttgg

SEQ ID NO: 3367 - RNA, 20 nt, Homo sapiens
  source 1..20: mol_type = genomic RNA
caggaccaggaaaacttggt

SEQ ID NO: 3368 - RNA, 20 nt, Homo sapiens
  source 1..20: mol_type = genomic RNA
aggaccaggaaaacttggtt

SEQ ID NO: 3369 - RNA, 20 nt, Homo sapiens
  source 1..20: mol_type = genomic RNA
ggaccaggaaaacttggttc

SEQ ID NO: 3370 - RNA, 20 nt, Homo sapiens
  source 1..20: mol_type = genomic RNA
gaccaggaaaacttggttct

SEQ ID NO: 3371 - RNA, 20 nt, Homo sapiens
  source 1..20: mol_type = genomic RNA
accaggaaaacttggttctg

SEQ ID NO: 3372 - RNA, 20 nt, Homo sapiens
  source 1..20: mol_type = genomic RNA
ccaggaaaacttggttctga

SEQ ID NO: 3373 - RNA, 20 nt, Homo sapiens
  source 1..20: mol_type = genomic RNA
caggaaaacttggttctgaa

SEQ ID NO: 3374 - RNA, 20 nt, Homo sapiens
  source 1..20: mol_type = genomic RNA
aggaaaacttggttctgaat

SEQ ID NO: 3375 - RNA, 20 nt, Homo sapiens
  source 1..20: mol_type = genomic RNA
ggaaaacttggttctgaatg

SEQ ID NO: 3376 - RNA, 20 nt, Homo sapiens
  source 1..20: mol_type = genomic RNA
gaaaacttggttctgaatga

SEQ ID NO: 3377 - RNA, 20 nt, Homo sapiens
  source 1..20: mol_type = genomic RNA
aaaacttggttctgaatgag

SEQ ID NO: 3378 - RNA, 20 nt, Homo sapiens
  source 1..20: mol_type = genomic RNA
aaacttggttctgaatgagg

SEQ ID NO: 3379 - RNA, 20 nt, Homo sapiens
  source 1..20: mol_type = genomic RNA
aacttggttctgaatgaggt

SEQ ID NO: 3380 - RNA, 20 nt, Homo sapiens
  source 1..20: mol_type = genomic RNA
acttggttctgaatgaggta

SEQ ID NO: 3381 - RNA, 20 nt, Homo sapiens
  source 1..20: mol_type = genomic RNA
cttggttctgaatgaggtat

SEQ ID NO: 3382 - RNA, 20 nt, Homo sapiens
  source 1..20: mol_type = genomic RNA
ttggttctgaatgaggtata

SEQ ID NO: 3383 - RNA, 20 nt, Homo sapiens
  source 1..20: mol_type = genomic RNA
tggttctgaatgaggtatac

SEQ ID NO: 3384 - RNA, 20 nt, Homo sapiens
  source 1..20: mol_type = genomic RNA
ggttctgaatgaggtatact

SEQ ID NO: 3385 - RNA, 20 nt, Homo sapiens
  source 1..20: mol_type = genomic RNA
gttctgaatgaggtatactt

SEQ ID NO: 3386 - RNA, 20 nt, Homo sapiens
  source 1..20: mol_type = genomic RNA
ttctgaatgaggtatactta

SEQ ID NO: 3387 - RNA, 20 nt, Homo sapiens
  source 1..20: mol_type = genomic RNA
tctgaatgaggtatacttag

SEQ ID NO: 3388 - RNA, 20 nt, Homo sapiens
  source 1..20: mol_type = genomic RNA
ctgaatgaggtatacttagg

SEQ ID NO: 3389 - RNA, 20 nt, Homo sapiens
  source 1..20: mol_type = genomic RNA
tgaatgaggtatacttaggc

SEQ ID NO: 3390 - RNA, 20 nt, Homo sapiens
  source 1..20: mol_type = genomic RNA
gaatgaggtatacttaggca

SEQ ID NO: 3391 - RNA, 20 nt, Homo sapiens
  source 1..20: mol_type = genomic RNA
aatgaggtatacttaggcaa

SEQ ID NO: 3392 - RNA, 20 nt, Homo sapiens
  source 1..20: mol_type = genomic RNA
atgaggtatacttaggcaaa

SEQ ID NO: 3393 - RNA, 20 nt, Homo sapiens
  source 1..20: mol_type = genomic RNA
tgaggtatacttaggcaaag

SEQ ID NO: 3394 - RNA, 20 nt, Homo sapiens
  source 1..20: mol_type = genomic RNA
gaggtatacttaggcaaaga

SEQ ID NO: 3395 - RNA, 20 nt, Homo sapiens
  source 1..20: mol_type = genomic RNA
aggtatacttaggcaaagag

SEQ ID NO: 3396 - RNA, 20 nt, Homo sapiens
  source 1..20: mol_type = genomic RNA
ggtatacttaggcaaagaga

SEQ ID NO: 3397 - RNA, 20 nt, Homo sapiens
  source 1..20: mol_type = genomic RNA
gtatacttaggcaaagagaa

SEQ ID NO: 3398 - RNA, 20 nt, Homo sapiens
  source 1..20: mol_type = genomic RNA
tatacttaggcaaagagaaa

SEQ ID NO: 3399 - RNA, 20 nt, Homo sapiens
  source 1..20: mol_type = genomic RNA
atacttaggcaaagagaaat

SEQ ID NO: 3400 - RNA, 20 nt, Homo sapiens
  source 1..20: mol_type = genomic RNA
tacttaggcaaagagaaatt

SEQ ID NO: 3401 - RNA, 20 nt, Homo sapiens
  source 1..20: mol_type = genomic RNA
acttaggcaaagagaaattt

SEQ ID NO: 3402 - RNA, 20 nt, Homo sapiens
  source 1..20: mol_type = genomic RNA
cttaggcaaagagaaatttg

SEQ ID NO: 3403 - RNA, 20 nt, Homo sapiens
  source 1..20: mol_type = genomic RNA
ttaggcaaagagaaatttga

SEQ ID NO: 3404 - RNA, 20 nt, Homo sapiens
  source 1..20: mol_type = genomic RNA
taggcaaagagaaatttgac

SEQ ID NO: 3405 - RNA, 20 nt, Homo sapiens
  source 1..20: mol_type = genomic RNA
aggcaaagagaaatttgaca

SEQ ID NO: 3406 - RNA, 20 nt, Homo sapiens
  source 1..20: mol_type = genomic RNA
ggcaaagagaaatttgacag

SEQ ID NO: 3407 - RNA, 20 nt, Homo sapiens
  source 1..20: mol_type = genomic RNA
gcaaagagaaatttgacagt

SEQ ID NO: 3408 - RNA, 20 nt, Homo sapiens
  source 1..20: mol_type = genomic RNA
caaagagaaatttgacagtg

SEQ ID NO: 3409 - RNA, 20 nt, Homo sapiens
  source 1..20: mol_type = genomic RNA
aaagagaaatttgacagtgt

SEQ ID NO: 3410 - RNA, 20 nt, Homo sapiens
  source 1..20: mol_type = genomic RNA
aagagaaatttgacagtgtt

SEQ ID NO: 3411 - RNA, 20 nt, Homo sapiens
  source 1..20: mol_type = genomic RNA
agagaaatttgacagtgttc

SEQ ID NO: 3412 - RNA, 20 nt, Homo sapiens
  source 1..20: mol_type = genomic RNA
gagaaatttgacagtgttca

SEQ ID NO: 3413 - RNA, 20 nt, Homo sapiens
  source 1..20: mol_type = genomic RNA
agaaatttgacagtgttcat

SEQ ID NO: 3414 - RNA, 20 nt, Homo sapiens
  source 1..20: mol_type = genomic RNA
gaaatttgacagtgttcatt

SEQ ID NO: 3415 - RNA, 20 nt, Homo sapiens
  source 1..20: mol_type = genomic RNA
aaatttgacagtgttcattc

SEQ ID NO: 3416 - RNA, 20 nt, Homo sapiens
  source 1..20: mol_type = genomic RNA
aatttgacagtgttcattcc

SEQ ID NO: 3417 - RNA, 20 nt, Homo sapiens
  source 1..20: mol_type = genomic RNA
atttgacagtgttcattcca

SEQ ID NO: 3418 - RNA, 20 nt, Homo sapiens
  source 1..20: mol_type = genomic RNA
tttgacagtgttcattccaa

SEQ ID NO: 3419 - RNA, 20 nt, Homo sapiens
  source 1..20: mol_type = genomic RNA
ttgacagtgttcattccaag

SEQ ID NO: 3420 - RNA, 20 nt, Homo sapiens
  source 1..20: mol_type = genomic RNA
tgacagtgttcattccaagt

SEQ ID NO: 3421 - RNA, 20 nt, Homo sapiens
  source 1..20: mol_type = genomic RNA
gacagtgttcattccaagta

SEQ ID NO: 3422 - RNA, 20 nt, Homo sapiens
  source 1..20: mol_type = genomic RNA
acagtgttcattccaagtat

SEQ ID NO: 3423 - RNA, 20 nt, Homo sapiens
  source 1..20: mol_type = genomic RNA
cagtgttcattccaagtata

SEQ ID NO: 3424 - RNA, 20 nt, Homo sapiens
  source 1..20: mol_type = genomic RNA
agtgttcattccaagtatat

SEQ ID NO: 3425 - RNA, 20 nt, Homo sapiens
  source 1..20: mol_type = genomic RNA
gtgttcattccaagtatatg

SEQ ID NO: 3426 - RNA, 20 nt, Homo sapiens
  source 1..20: mol_type = genomic RNA
tgttcattccaagtatatgg

SEQ ID NO: 3427 - RNA, 20 nt, Homo sapiens
  source 1..20: mol_type = genomic RNA
gttcattccaagtatatggg

SEQ ID NO: 3428 - RNA, 20 nt, Homo sapiens
  source 1..20: mol_type = genomic RNA
ttcattccaagtatatgggc

SEQ ID NO: 3429 - RNA, 20 nt, Homo sapiens
  source 1..20: mol_type = genomic RNA
tcattccaagtatatgggcc

SEQ ID NO: 3430 - RNA, 20 nt, Homo sapiens
  source 1..20: mol_type = genomic RNA
cattccaagtatatgggccg

SEQ ID NO: 3431 - RNA, 20 nt, Homo sapiens
  source 1..20: mol_type = genomic RNA
attccaagtatatgggccgc

SEQ ID NO: 3432 - RNA, 20 nt, Homo sapiens
  source 1..20: mol_type = genomic RNA
ttccaagtatatgggccgca

SEQ ID NO: 3433 - RNA, 20 nt, Homo sapiens
  source 1..20: mol_type = genomic RNA
tccaagtatatgggccgcac

SEQ ID NO: 3434 - RNA, 20 nt, Homo sapiens
  source 1..20: mol_type = genomic RNA
ccaagtatatgggccgcaca

SEQ ID NO: 3435 - RNA, 20 nt, Homo sapiens
  source 1..20: mol_type = genomic RNA
caagtatatgggccgcacaa

SEQ ID NO: 3436 - RNA, 20 nt, Homo sapiens
  source 1..20: mol_type = genomic RNA
aagtatatgggccgcacaag

SEQ ID NO: 3437 - RNA, 20 nt, Homo sapiens
  source 1..20: mol_type = genomic RNA
agtatatgggccgcacaagt

SEQ ID NO: 3438 - RNA, 20 nt, Homo sapiens
  source 1..20: mol_type = genomic RNA
gtatatgggccgcacaagtt

SEQ ID NO: 3439 - RNA, 20 nt, Homo sapiens
  source 1..20: mol_type = genomic RNA
tatatgggccgcacaagttt

SEQ ID NO: 3440 - RNA, 20 nt, Homo sapiens
  source 1..20: mol_type = genomic RNA
atatgggccgcacaagtttt

SEQ ID NO: 3441 - RNA, 20 nt, Homo sapiens
  source 1..20: mol_type = genomic RNA
tatgggccgcacaagttttg

SEQ ID NO: 3442 - RNA, 20 nt, Homo sapiens
  source 1..20: mol_type = genomic RNA
atgggccgcacaagttttga

SEQ ID NO: 3443 - RNA, 20 nt, Homo sapiens
  source 1..20: mol_type = genomic RNA
tgggccgcacaagttttgat

SEQ ID NO: 3444 - RNA, 20 nt, Homo sapiens
  source 1..20: mol_type = genomic RNA
gggccgcacaagttttgatt

SEQ ID NO: 3445 - RNA, 20 nt, Homo sapiens
  source 1..20: mol_type = genomic RNA
ggccgcacaagttttgattc

SEQ ID NO: 3446 - RNA, 20 nt, Homo sapiens
  source 1..20: mol_type = genomic RNA
gccgcacaagttttgattcg

SEQ ID NO: 3447 - RNA, 20 nt, Homo sapiens
  source 1..20: mol_type = genomic RNA
ccgcacaagttttgattcgg

SEQ ID NO: 3448 - RNA, 20 nt, Homo sapiens
  source 1..20: mol_type = genomic RNA
cgcacaagttttgattcgga

SEQ ID NO: 3449 - RNA, 20 nt, Homo sapiens
  source 1..20: mol_type = genomic RNA
gcacaagttttgattcggac

SEQ ID NO: 3450 - RNA, 20 nt, Homo sapiens
  source 1..20: mol_type = genomic RNA
cacaagttttgattcggaca

SEQ ID NO: 3451 - RNA, 20 nt, Homo sapiens
  source 1..20: mol_type = genomic RNA
acaagttttgattcggacag

SEQ ID NO: 3452 - RNA, 20 nt, Homo sapiens
  source 1..20: mol_type = genomic RNA
caagttttgattcggacagt

SEQ ID NO: 3453 - RNA, 20 nt, Homo sapiens
  source 1..20: mol_type = genomic RNA
aagttttgattcggacagtt

SEQ ID NO: 3454 - RNA, 20 nt, Homo sapiens
  source 1..20: mol_type = genomic RNA
agttttgattcggacagttg

SEQ ID NO: 3455 - RNA, 20 nt, Homo sapiens
  source 1..20: mol_type = genomic RNA
gttttgattcggacagttgg

SEQ ID NO: 3456 - RNA, 20 nt, Homo sapiens
  source 1..20: mol_type = genomic RNA
ttttgattcggacagttgga

SEQ ID NO: 3457 - RNA, 20 nt, Homo sapiens
  source 1..20: mol_type = genomic RNA
tttgattcggacagttggac

SEQ ID NO: 3458 - RNA, 20 nt, Homo sapiens
  source 1..20: mol_type = genomic RNA
ttgattcggacagttggacc

SEQ ID NO: 3459 - RNA, 20 nt, Homo sapiens
  source 1..20: mol_type = genomic RNA
tgattcggacagttggaccc

SEQ ID NO: 3460 - RNA, 20 nt, Homo sapiens
  source 1..20: mol_type = genomic RNA
gattcggacagttggaccct

SEQ ID NO: 3461 - RNA, 20 nt, Homo sapiens
  source 1..20: mol_type = genomic RNA
attcggacagttggaccctg

SEQ ID NO: 3462 - RNA, 20 nt, Homo sapiens
  source 1..20: mol_type = genomic RNA
ttcggacagttggaccctga

SEQ ID NO: 3463 - RNA, 20 nt, Homo sapiens
  source 1..20: mol_type = genomic RNA
tcggacagttggaccctgag

SEQ ID NO: 3464 - RNA, 20 nt, Homo sapiens
  source 1..20: mol_type = genomic RNA
cggacagttggaccctgaga

SEQ ID NO: 3465 - RNA, 20 nt, Homo sapiens
  source 1..20: mol_type = genomic RNA
ggacagttggaccctgagac

SEQ ID NO: 3466 - RNA, 20 nt, Homo sapiens
  source 1..20: mol_type = genomic RNA
gacagttggaccctgagact

SEQ ID NO: 3467 - RNA, 20 nt, Homo sapiens
  source 1..20: mol_type = genomic RNA
acagttggaccctgagactt

SEQ ID NO: 3468 - RNA, 20 nt, Homo sapiens
  source 1..20: mol_type = genomic RNA
cagttggaccctgagacttc

SEQ ID NO: 3469 - RNA, 20 nt, Homo sapiens
  source 1..20: mol_type = genomic RNA
agttggaccctgagacttca

SEQ ID NO: 3470 - RNA, 20 nt, Homo sapiens
  source 1..20: mol_type = genomic RNA
gttggaccctgagacttcac

SEQ ID NO: 3471 - RNA, 20 nt, Homo sapiens
  source 1..20: mol_type = genomic RNA
ttggaccctgagacttcaca

SEQ ID NO: 3472 - RNA, 20 nt, Homo sapiens
  source 1..20: mol_type = genomic RNA
tggaccctgagacttcacaa

SEQ ID NO: 3473 - RNA, 20 nt, Homo sapiens
  source 1..20: mol_type = genomic RNA
ggaccctgagacttcacaat

SEQ ID NO: 3474 - RNA, 20 nt, Homo sapiens
  source 1..20: mol_type = genomic RNA
gaccctgagacttcacaatc

SEQ ID NO: 3475 - RNA, 20 nt, Homo sapiens
  source 1..20: mol_type = genomic RNA
accctgagacttcacaatct

SEQ ID NO: 3476 - RNA, 20 nt, Homo sapiens
  source 1..20: mol_type = genomic RNA
ccctgagacttcacaatctt

SEQ ID NO: 3477 - RNA, 20 nt, Homo sapiens
  source 1..20: mol_type = genomic RNA
cctgagacttcacaatcttc

SEQ ID NO: 3478 - RNA, 20 nt, Homo sapiens
  source 1..20: mol_type = genomic RNA
ctgagacttcacaatcttca

SEQ ID NO: 3479 - RNA, 20 nt, Homo sapiens
  source 1..20: mol_type = genomic RNA
tgagacttcacaatcttcag

SEQ ID NO: 3480 - RNA, 20 nt, Homo sapiens
  source 1..20: mol_type = genomic RNA
gagacttcacaatcttcaga

SEQ ID NO: 3481 - RNA, 20 nt, Homo sapiens
  source 1..20: mol_type = genomic RNA
agacttcacaatcttcagat

SEQ ID NO: 3482 - RNA, 20 nt, Homo sapiens
  source 1..20: mol_type = genomic RNA
gacttcacaatcttcagatc

SEQ ID NO: 3483 - RNA, 20 nt, Homo sapiens
  source 1..20: mol_type = genomic RNA
acttcacaatcttcagatca

SEQ ID NO: 3484 - RNA, 20 nt, Homo sapiens
  source 1..20: mol_type = genomic RNA
cttcacaatcttcagatcaa

SEQ ID NO: 3485 - RNA, 20 nt, Homo sapiens
  source 1..20: mol_type = genomic RNA
ttcacaatcttcagatcaag

SEQ ID NO: 3486 - RNA, 20 nt, Homo sapiens
  source 1..20: mol_type = genomic RNA
tcacaatcttcagatcaagg

SEQ ID NO: 3487 - RNA, 20 nt, Homo sapiens
  source 1..20: mol_type = genomic RNA
cacaatcttcagatcaagga

SEQ ID NO: 3488 - RNA, 20 nt, Homo sapiens
  source 1..20: mol_type = genomic RNA
acaatcttcagatcaaggac

SEQ ID NO: 3489 - RNA, 20 nt, Homo sapiens
  source 1..20: mol_type = genomic RNA
caatcttcagatcaaggaca

SEQ ID NO: 3490 - RNA, 20 nt, Homo sapiens
  source 1..20: mol_type = genomic RNA
aatcttcagatcaaggacaa

SEQ ID NO: 3491 - RNA, 20 nt, Homo sapiens
  source 1..20: mol_type = genomic RNA
atcttcagatcaaggacaag

SEQ ID NO: 3492 - RNA, 20 nt, Homo sapiens
  source 1..20: mol_type = genomic RNA
tcttcagatcaaggacaagg

SEQ ID NO: 3493 - RNA, 20 nt, Homo sapiens
  source 1..20: mol_type = genomic RNA
cttcagatcaaggacaaggg

SEQ ID NO: 3494 - RNA, 20 nt, Homo sapiens
  source 1..20: mol_type = genomic RNA
ttcagatcaaggacaagggc

SEQ ID NO: 3495 - RNA, 20 nt, Homo sapiens
  source 1..20: mol_type = genomic RNA
tcagatcaaggacaagggct

SEQ ID NO: 3496 - RNA, 20 nt, Homo sapiens
  source 1..20: mol_type = genomic RNA
cagatcaaggacaagggctt

SEQ ID NO: 3497 - RNA, 20 nt, Homo sapiens
  source 1..20: mol_type = genomic RNA
agatcaaggacaagggcttg

SEQ ID NO: 3498 - RNA, 20 nt, Homo sapiens
  source 1..20: mol_type = genomic RNA
gatcaaggacaagggcttgt

SEQ ID NO: 3499 - RNA, 20 nt, Homo sapiens
  source 1..20: mol_type = genomic RNA
atcaaggacaagggcttgta

SEQ ID NO: 3500 - RNA, 20 nt, Homo sapiens
  source 1..20: mol_type = genomic RNA
tcaaggacaagggcttgtat

SEQ ID NO: 3501 - RNA, 20 nt, Homo sapiens
  source 1..20: mol_type = genomic RNA
caaggacaagggcttgtatc

SEQ ID NO: 3502 - RNA, 20 nt, Homo sapiens
  source 1..20: mol_type = genomic RNA
aaggacaagggcttgtatca

SEQ ID NO: 3503 - RNA, 20 nt, Homo sapiens
  source 1..20: mol_type = genomic RNA
aggacaagggcttgtatcaa

SEQ ID NO: 3504 - RNA, 20 nt, Homo sapiens
  source 1..20: mol_type = genomic RNA
ggacaagggcttgtatcaat

SEQ ID NO: 3505 - RNA, 20 nt, Homo sapiens
  source 1..20: mol_type = genomic RNA
gacaagggcttgtatcaatg

SEQ ID NO: 3506 - RNA, 20 nt, Homo sapiens
  source 1..20: mol_type = genomic RNA
acaagggcttgtatcaatgt

SEQ ID NO: 3507 - RNA, 20 nt, Homo sapiens
  source 1..20: mol_type = genomic RNA
caagggcttgtatcaatgta

SEQ ID NO: 3508 - RNA, 20 nt, Homo sapiens
  source 1..20: mol_type = genomic RNA
aagggcttgtatcaatgtat

SEQ ID NO: 3509 - RNA, 20 nt, Homo sapiens
  source 1..20: mol_type = genomic RNA
agggcttgtatcaatgtatc

SEQ ID NO: 3510 - RNA, 20 nt, Homo sapiens
  source 1..20: mol_type = genomic RNA
gggcttgtatcaatgtatca

SEQ ID NO: 3511 - RNA, 20 nt, Homo sapiens
  source 1..20: mol_type = genomic RNA
ggcttgtatcaatgtatcat

SEQ ID NO: 3512 - RNA, 20 nt, Homo sapiens
  source 1..20: mol_type = genomic RNA
gcttgtatcaatgtatcatc

SEQ ID NO: 3513 - RNA, 20 nt, Homo sapiens
  source 1..20: mol_type = genomic RNA
cttgtatcaatgtatcatcc

SEQ ID NO: 3514 - RNA, 20 nt, Homo sapiens
  source 1..20: mol_type = genomic RNA
ttgtatcaatgtatcatcca

SEQ ID NO: 3515 - RNA, 20 nt, Homo sapiens
  source 1..20: mol_type = genomic RNA
tgtatcaatgtatcatccat

SEQ ID NO: 3516 - RNA, 20 nt, Homo sapiens
  source 1..20: mol_type = genomic RNA
gtatcaatgtatcatccatc

SEQ ID NO: 3517 - RNA, 20 nt, Homo sapiens
  source 1..20: mol_type = genomic RNA
tatcaatgtatcatccatca

SEQ ID NO: 3518 - RNA, 20 nt, Homo sapiens
  source 1..20: mol_type = genomic RNA
atcaatgtatcatccatcac

SEQ ID NO: 3519 - RNA, 20 nt, Homo sapiens
  source 1..20: mol_type = genomic RNA
tcaatgtatcatccatcaca

SEQ ID NO: 3520 - RNA, 20 nt, Homo sapiens
  source 1..20: mol_type = genomic RNA
caatgtatcatccatcacaa

SEQ ID NO: 3521 - RNA, 20 nt, Homo sapiens
  source 1..20: mol_type = genomic RNA
aatgtatcatccatcacaaa

SEQ ID NO: 3522 - RNA, 20 nt, Homo sapiens
  source 1..20: mol_type = genomic RNA
atgtatcatccatcacaaaa

SEQ ID NO: 3523 - RNA, 20 nt, Homo sapiens
  source 1..20: mol_type = genomic RNA
tgtatcatccatcacaaaaa

SEQ ID NO: 3524 - RNA, 20 nt, Homo sapiens
  source 1..20: mol_type = genomic RNA
gtatcatccatcacaaaaag

SEQ ID NO: 3525 - RNA, 20 nt, Homo sapiens
  source 1..20: mol_type = genomic RNA
tatcatccatcacaaaaagc

SEQ ID NO: 3526 - RNA, 20 nt, Homo sapiens
  source 1..20: mol_type = genomic RNA
atcatccatcacaaaaagcc

SEQ ID NO: 3527 - RNA, 20 nt, Homo sapiens
  source 1..20: mol_type = genomic RNA
tcatccatcacaaaaagccc

SEQ ID NO: 3528 - RNA, 20 nt, Homo sapiens
  source 1..20: mol_type = genomic RNA
catccatcacaaaaagccca

SEQ ID NO: 3529 - RNA, 20 nt, Homo sapiens
  source 1..20: mol_type = genomic RNA
atccatcacaaaaagcccac

SEQ ID NO: 3530 - RNA, 20 nt, Homo sapiens
  source 1..20: mol_type = genomic RNA
tccatcacaaaaagcccaca

SEQ ID NO: 3531 - RNA, 20 nt, Homo sapiens
  source 1..20: mol_type = genomic RNA
ccatcacaaaaagcccacag

SEQ ID NO: 3532 - RNA, 20 nt, Homo sapiens
  source 1..20: mol_type = genomic RNA
catcacaaaaagcccacagg

SEQ ID NO: 3533 - RNA, 20 nt, Homo sapiens
  source 1..20: mol_type = genomic RNA
atcacaaaaagcccacagga

SEQ ID NO: 3534 - RNA, 20 nt, Homo sapiens
  source 1..20: mol_type = genomic RNA
tcacaaaaagcccacaggaa

SEQ ID NO: 3535 - RNA, 20 nt, Homo sapiens
  source 1..20: mol_type = genomic RNA
cacaaaaagcccacaggaat

SEQ ID NO: 3536 - RNA, 20 nt, Homo sapiens
  source 1..20: mol_type = genomic RNA
acaaaaagcccacaggaatg

SEQ ID NO: 3537 - RNA, 20 nt, Homo sapiens
  source 1..20: mol_type = genomic RNA
caaaaagcccacaggaatga

SEQ ID NO: 3538 - RNA, 20 nt, Homo sapiens
  source 1..20: mol_type = genomic RNA
aaaaagcccacaggaatgat

SEQ ID NO: 3539 - RNA, 20 nt, Homo sapiens
  source 1..20: mol_type = genomic RNA
aaaagcccacaggaatgatt

SEQ ID NO: 3540 - RNA, 20 nt, Homo sapiens
  source 1..20: mol_type = genomic RNA
aaagcccacaggaatgattc

SEQ ID NO: 3541 - RNA, 20 nt, Homo sapiens
  source 1..20: mol_type = genomic RNA
aagcccacaggaatgattcg

SEQ ID NO: 3542 - RNA, 20 nt, Homo sapiens
  source 1..20: mol_type = genomic RNA
agcccacaggaatgattcgc

SEQ ID NO: 3543 - RNA, 20 nt, Homo sapiens
  source 1..20: mol_type = genomic RNA
gcccacaggaatgattcgca

SEQ ID NO: 3544 - RNA, 20 nt, Homo sapiens
  source 1..20: mol_type = genomic RNA
cccacaggaatgattcgcat

SEQ ID NO: 3545 - RNA, 20 nt, Homo sapiens
  source 1..20: mol_type = genomic RNA
ccacaggaatgattcgcatc

SEQ ID NO: 3546 - RNA, 20 nt, Homo sapiens
  source 1..20: mol_type = genomic RNA
cacaggaatgattcgcatcc

SEQ ID NO: 3547 - RNA, 20 nt, Homo sapiens
  source 1..20: mol_type = genomic RNA
acaggaatgattcgcatcca

SEQ ID NO: 3548 - RNA, 20 nt, Homo sapiens
  source 1..20: mol_type = genomic RNA
caggaatgattcgcatccac

SEQ ID NO: 3549 - RNA, 20 nt, Homo sapiens
  source 1..20: mol_type = genomic RNA
aggaatgattcgcatccacc

SEQ ID NO: 3550 - RNA, 20 nt, Homo sapiens
  source 1..20: mol_type = genomic RNA
ggaatgattcgcatccacca

SEQ ID NO: 3551 - RNA, 20 nt, Homo sapiens
  source 1..20: mol_type = genomic RNA
gaatgattcgcatccaccag

SEQ ID NO: 3552 - RNA, 20 nt, Homo sapiens
  source 1..20: mol_type = genomic RNA
aatgattcgcatccaccaga

SEQ ID NO: 3553 - RNA, 20 nt, Homo sapiens
  source 1..20: mol_type = genomic RNA
atgattcgcatccaccagat

SEQ ID NO: 3554 - RNA, 20 nt, Homo sapiens
  source 1..20: mol_type = genomic RNA
tgattcgcatccaccagatg

SEQ ID NO: 3555 - RNA, 20 nt, Homo sapiens
  source 1..20: mol_type = genomic RNA
gattcgcatccaccagatga

SEQ ID NO: 3556 - RNA, 20 nt, Homo sapiens
  source 1..20: mol_type = genomic RNA
attcgcatccaccagatgaa

SEQ ID NO: 3557 - RNA, 20 nt, Homo sapiens
  source 1..20: mol_type = genomic RNA
ttcgcatccaccagatgaat

SEQ ID NO: 3558 - RNA, 20 nt, Homo sapiens
  source 1..20: mol_type = genomic RNA
tcgcatccaccagatgaatt

SEQ ID NO: 3559 - RNA, 20 nt, Homo sapiens
  source 1..20: mol_type = genomic RNA
cgcatccaccagatgaattc

SEQ ID NO: 3560 - RNA, 20 nt, Homo sapiens
  source 1..20: mol_type = genomic RNA
gcatccaccagatgaattct

SEQ ID NO: 3561 - RNA, 20 nt, Homo sapiens
  source 1..20: mol_type = genomic RNA
catccaccagatgaattctg

SEQ ID NO: 3562 - RNA, 20 nt, Homo sapiens
  source 1..20: mol_type = genomic RNA
atccaccagatgaattctga

SEQ ID NO: 3563 - RNA, 20 nt, Homo sapiens
  source 1..20: mol_type = genomic RNA
tccaccagatgaattctgaa

SEQ ID NO: 3564 - RNA, 20 nt, Homo sapiens
  source 1..20: mol_type = genomic RNA
ccaccagatgaattctgaac

SEQ ID NO: 3565 - RNA, 20 nt, Homo sapiens
  source 1..20: mol_type = genomic RNA
caccagatgaattctgaact

SEQ ID NO: 3566 - RNA, 20 nt, Homo sapiens
  source 1..20: mol_type = genomic RNA
accagatgaattctgaactg

SEQ ID NO: 3567 - RNA, 20 nt, Homo sapiens
  source 1..20: mol_type = genomic RNA
ccagatgaattctgaactgt

SEQ ID NO: 3568 - RNA, 20 nt, Homo sapiens
  source 1..20: mol_type = genomic RNA
cagatgaattctgaactgtc

SEQ ID NO: 3569 - RNA, 20 nt, Homo sapiens
  source 1..20: mol_type = genomic RNA
agatgaattctgaactgtca

SEQ ID NO: 3570 - RNA, 20 nt, Homo sapiens
  source 1..20: mol_type = genomic RNA
gatgaattctgaactgtcag

SEQ ID NO: 3571 - RNA, 20 nt, Homo sapiens
  source 1..20: mol_type = genomic RNA
atgaattctgaactgtcagt

SEQ ID NO: 3572 - RNA, 20 nt, Homo sapiens
  source 1..20: mol_type = genomic RNA
tgaattctgaactgtcagtg

SEQ ID NO: 3573 - RNA, 20 nt, Homo sapiens
  source 1..20: mol_type = genomic RNA
gaattctgaactgtcagtgc

SEQ ID NO: 3574 - RNA, 20 nt, Homo sapiens
  source 1..20: mol_type = genomic RNA
aattctgaactgtcagtgct

SEQ ID NO: 3575 - RNA, 20 nt, Homo sapiens
  source 1..20: mol_type = genomic RNA
attctgaactgtcagtgctt

SEQ ID NO: 3576 - RNA, 20 nt, Homo sapiens
  source 1..20: mol_type = genomic RNA
ttctgaactgtcagtgcttg

SEQ ID NO: 3577 - RNA, 20 nt, Homo sapiens
  source 1..20: mol_type = genomic RNA
tctgaactgtcagtgcttgc

SEQ ID NO: 3578 - RNA, 20 nt, Homo sapiens
  source 1..20: mol_type = genomic RNA
ctgaactgtcagtgcttgct

SEQ ID NO: 3579 - RNA, 20 nt, Homo sapiens
  source 1..20: mol_type = genomic RNA
tgaactgtcagtgcttgcta

SEQ ID NO: 3580 - RNA, 20 nt, Homo sapiens
  source 1..20: mol_type = genomic RNA
gaactgtcagtgcttgctaa

SEQ ID NO: 3581 - RNA, 20 nt, Homo sapiens
  source 1..20: mol_type = genomic RNA
aactgtcagtgcttgctaac

SEQ ID NO: 3582 - RNA, 20 nt, Homo sapiens
  source 1..20: mol_type = genomic RNA
actgtcagtgcttgctaact

SEQ ID NO: 3583 - RNA, 20 nt, Homo sapiens
  source 1..20: mol_type = genomic RNA
ctgtcagtgcttgctaactt

SEQ ID NO: 3584 - RNA, 20 nt, Homo sapiens
  source 1..20: mol_type = genomic RNA
tgtcagtgcttgctaacttc

SEQ ID NO: 3585 - RNA, 20 nt, Homo sapiens
  source 1..20: mol_type = genomic RNA
gtcagtgcttgctaacttca

SEQ ID NO: 3586 - RNA, 20 nt, Homo sapiens
  source 1..20: mol_type = genomic RNA
tcagtgcttgctaacttcag

SEQ ID NO: 3587 - RNA, 20 nt, Homo sapiens
  source 1..20: mol_type = genomic RNA
cagtgcttgctaacttcagt

SEQ ID NO: 3588 - RNA, 20 nt, Homo sapiens
  source 1..20: mol_type = genomic RNA
agtgcttgctaacttcagtc

SEQ ID NO: 3589 - RNA, 20 nt, Homo sapiens
  source 1..20: mol_type = genomic RNA
gtgcttgctaacttcagtca

SEQ ID NO: 3590 - RNA, 20 nt, Homo sapiens
  source 1..20: mol_type = genomic RNA
tgcttgctaacttcagtcaa

SEQ ID NO: 3591 - RNA, 20 nt, Homo sapiens
  source 1..20: mol_type = genomic RNA
gcttgctaacttcagtcaac

SEQ ID NO: 3592 - RNA, 20 nt, Homo sapiens
  source 1..20: mol_type = genomic RNA
cttgctaacttcagtcaacc

SEQ ID NO: 3593 - RNA, 20 nt, Homo sapiens
  source 1..20: mol_type = genomic RNA
ttgctaacttcagtcaacct

SEQ ID NO: 3594 - RNA, 20 nt, Homo sapiens
  source 1..20: mol_type = genomic RNA
tgctaacttcagtcaacctg

SEQ ID NO: 3595 - RNA, 20 nt, Homo sapiens
  source 1..20: mol_type = genomic RNA
gctaacttcagtcaacctga

SEQ ID NO: 3596 - RNA, 20 nt, Homo sapiens
  source 1..20: mol_type = genomic RNA
ctaacttcagtcaacctgaa

SEQ ID NO: 3597 - RNA, 20 nt, Homo sapiens
  source 1..20: mol_type = genomic RNA
taacttcagtcaacctgaaa

SEQ ID NO: 3598 - RNA, 20 nt, Homo sapiens
  source 1..20: mol_type = genomic RNA
aacttcagtcaacctgaaat

SEQ ID NO: 3599 - RNA, 20 nt, Homo sapiens
  source 1..20: mol_type = genomic RNA
acttcagtcaacctgaaata

SEQ ID NO: 3600 - RNA, 20 nt, Homo sapiens
  source 1..20: mol_type = genomic RNA
cttcagtcaacctgaaatag

SEQ ID NO: 3601 - RNA, 20 nt, Homo sapiens
  source 1..20: mol_type = genomic RNA
ttcagtcaacctgaaatagt

SEQ ID NO: 3602 - RNA, 20 nt, Homo sapiens
  source 1..20: mol_type = genomic RNA
tcagtcaacctgaaatagta

SEQ ID NO: 3603 - RNA, 20 nt, Homo sapiens
  source 1..20: mol_type = genomic RNA
cagtcaacctgaaatagtac

SEQ ID NO: 3604 - RNA, 20 nt, Homo sapiens
  source 1..20: mol_type = genomic RNA
agtcaacctgaaatagtacc

SEQ ID NO: 3605 - RNA, 20 nt, Homo sapiens
  source 1..20: mol_type = genomic RNA
gtcaacctgaaatagtacca

SEQ ID NO: 3606 - RNA, 20 nt, Homo sapiens
  source 1..20: mol_type = genomic RNA
tcaacctgaaatagtaccaa

SEQ ID NO: 3607 - RNA, 20 nt, Homo sapiens
  source 1..20: mol_type = genomic RNA
caacctgaaatagtaccaat

SEQ ID NO: 3608 - RNA, 20 nt, Homo sapiens
  source 1..20: mol_type = genomic RNA
aacctgaaatagtaccaatt

SEQ ID NO: 3609 - RNA, 20 nt, Homo sapiens
  source 1..20: mol_type = genomic RNA
acctgaaatagtaccaattt

SEQ ID NO: 3610 - RNA, 20 nt, Homo sapiens
  source 1..20: mol_type = genomic RNA
cctgaaatagtaccaatttc

SEQ ID NO: 3611 - RNA, 20 nt, Homo sapiens
  source 1..20: mol_type = genomic RNA
ctgaaatagtaccaatttct

SEQ ID NO: 3612 - RNA, 20 nt, Homo sapiens
  source 1..20: mol_type = genomic RNA
tgaaatagtaccaatttcta

SEQ ID NO: 3613 - RNA, 20 nt, Homo sapiens
  source 1..20: mol_type = genomic RNA
gaaatagtaccaatttctaa

SEQ ID NO: 3614 - RNA, 20 nt, Homo sapiens
  source 1..20: mol_type = genomic RNA
aaatagtaccaatttctaat

SEQ ID NO: 3615 - RNA, 20 nt, Homo sapiens
  source 1..20: mol_type = genomic RNA
aatagtaccaatttctaata

SEQ ID NO: 3616 - RNA, 20 nt, Homo sapiens
  source 1..20: mol_type = genomic RNA
atagtaccaatttctaatat

SEQ ID NO: 3617 - RNA, 20 nt, Homo sapiens
  source 1..20: mol_type = genomic RNA
tagtaccaatttctaatata

SEQ ID NO: 3618 - RNA, 20 nt, Homo sapiens
  source 1..20: mol_type = genomic RNA
agtaccaatttctaatataa

SEQ ID NO: 3619 - RNA, 20 nt, Homo sapiens
  source 1..20: mol_type = genomic RNA
gtaccaatttctaatataac

SEQ ID NO: 3620 - RNA, 20 nt, Homo sapiens
  source 1..20: mol_type = genomic RNA
taccaatttctaatataaca

SEQ ID NO: 3621 - RNA, 20 nt, Homo sapiens
  source 1..20: mol_type = genomic RNA
accaatttctaatataacag

SEQ ID NO: 3622 - RNA, 20 nt, Homo sapiens
  source 1..20: mol_type = genomic RNA
ccaatttctaatataacaga

SEQ ID NO: 3623 - RNA, 20 nt, Homo sapiens
  source 1..20: mol_type = genomic RNA
caatttctaatataacagaa

SEQ ID NO: 3624 - RNA, 20 nt, Homo sapiens
  source 1..20: mol_type = genomic RNA
aatttctaatataacagaaa

SEQ ID NO: 3625 - RNA, 20 nt, Homo sapiens
  source 1..20: mol_type = genomic RNA
atttctaatataacagaaaa

SEQ ID NO: 3626 - RNA, 20 nt, Homo sapiens
  source 1..20: mol_type = genomic RNA
tttctaatataacagaaaat

SEQ ID NO: 3627 - RNA, 20 nt, Homo sapiens
  source 1..20: mol_type = genomic RNA
ttctaatataacagaaaatg

SEQ ID NO: 3628 - RNA, 20 nt, Homo sapiens
  source 1..20: mol_type = genomic RNA
tctaatataacagaaaatgt

SEQ ID NO: 3629 - RNA, 20 nt, Homo sapiens
  source 1..20: mol_type = genomic RNA
ctaatataacagaaaatgtg

SEQ ID NO: 3630 - RNA, 20 nt, Homo sapiens
  source 1..20: mol_type = genomic RNA
taatataacagaaaatgtgt

SEQ ID NO: 3631 - RNA, 20 nt, Homo sapiens
  source 1..20: mol_type = genomic RNA
aatataacagaaaatgtgta

SEQ ID NO: 3632 - RNA, 20 nt, Homo sapiens
  source 1..20: mol_type = genomic RNA
atataacagaaaatgtgtac

SEQ ID NO: 3633 - RNA, 20 nt, Homo sapiens
  source 1..20: mol_type = genomic RNA
tataacagaaaatgtgtaca

SEQ ID NO: 3634 - RNA, 20 nt, Homo sapiens
  source 1..20: mol_type = genomic RNA
ataacagaaaatgtgtacat

SEQ ID NO: 3635 - RNA, 20 nt, Homo sapiens
  source 1..20: mol_type = genomic RNA
taacagaaaatgtgtacata

SEQ ID NO: 3636 - RNA, 20 nt, Homo sapiens
  source 1..20: mol_type = genomic RNA
aacagaaaatgtgtacataa

SEQ ID NO: 3637 - RNA, 20 nt, Homo sapiens
  source 1..20: mol_type = genomic RNA
acagaaaatgtgtacataaa

SEQ ID NO: 3638 - RNA, 20 nt, Homo sapiens
  source 1..20: mol_type = genomic RNA
cagaaaatgtgtacataaat

SEQ ID NO: 3639 - RNA, 20 nt, Homo sapiens
  source 1..20: mol_type = genomic RNA
agaaaatgtgtacataaatt

SEQ ID NO: 3640 - RNA, 20 nt, Homo sapiens
  source 1..20: mol_type = genomic RNA
gaaaatgtgtacataaattt

SEQ ID NO: 3641 - RNA, 20 nt, Homo sapiens
  source 1..20: mol_type = genomic RNA
aaaatgtgtacataaatttg

SEQ ID NO: 3642 - RNA, 20 nt, Homo sapiens
  source 1..20: mol_type = genomic RNA
aaatgtgtacataaatttga

SEQ ID NO: 3643 - RNA, 20 nt, Homo sapiens
  source 1..20: mol_type = genomic RNA
aatgtgtacataaatttgac

SEQ ID NO: 3644 - RNA, 20 nt, Homo sapiens
  source 1..20: mol_type = genomic RNA
atgtgtacataaatttgacc

SEQ ID NO: 3645 - RNA, 20 nt, Homo sapiens
  source 1..20: mol_type = genomic RNA
tgtgtacataaatttgacct

SEQ ID NO: 3646 - RNA, 20 nt, Homo sapiens
  source 1..20: mol_type = genomic RNA
gtgtacataaatttgacctg

SEQ ID NO: 3647 - RNA, 20 nt, Homo sapiens
  source 1..20: mol_type = genomic RNA
tgtacataaatttgacctgc

SEQ ID NO: 3648 - RNA, 20 nt, Homo sapiens
  source 1..20: mol_type = genomic RNA
gtacataaatttgacctgct

SEQ ID NO: 3649 - RNA, 20 nt, Homo sapiens
  source 1..20: mol_type = genomic RNA
tacataaatttgacctgctc

SEQ ID NO: 3650 - RNA, 20 nt, Homo sapiens
  source 1..20: mol_type = genomic RNA
acataaatttgacctgctca

SEQ ID NO: 3651 - RNA, 20 nt, Homo sapiens
  source 1..20: mol_type = genomic RNA
cataaatttgacctgctcat

SEQ ID NO: 3652 - RNA, 20 nt, Homo sapiens
  source 1..20: mol_type = genomic RNA
ataaatttgacctgctcatc

SEQ ID NO: 3653 - RNA, 20 nt, Homo sapiens
  source 1..20: mol_type = genomic RNA
taaatttgacctgctcatct

SEQ ID NO: 3654 - RNA, 20 nt, Homo sapiens
  source 1..20: mol_type = genomic RNA
aaatttgacctgctcatcta

SEQ ID NO: 3655 - RNA, 20 nt, Homo sapiens
  source 1..20: mol_type = genomic RNA
aatttgacctgctcatctat

SEQ ID NO: 3656 - RNA, 20 nt, Homo sapiens
  source 1..20: mol_type = genomic RNA
atttgacctgctcatctata

SEQ ID NO: 3657 - RNA, 20 nt, Homo sapiens
  source 1..20: mol_type = genomic RNA
tttgacctgctcatctatac

SEQ ID NO: 3658 - RNA, 20 nt, Homo sapiens
  source 1..20: mol_type = genomic RNA
ttgacctgctcatctataca

SEQ ID NO: 3659 - RNA, 20 nt, Homo sapiens
  source 1..20: mol_type = genomic RNA
tgacctgctcatctatacac

SEQ ID NO: 3660 - RNA, 20 nt, Homo sapiens
  source 1..20: mol_type = genomic RNA
gacctgctcatctatacacg

SEQ ID NO: 3661 - RNA, 20 nt, Homo sapiens
  source 1..20: mol_type = genomic RNA
acctgctcatctatacacgg

SEQ ID NO: 3662 - RNA, 20 nt, Homo sapiens
  source 1..20: mol_type = genomic RNA
cctgctcatctatacacggt

SEQ ID NO: 3663 - RNA, 20 nt, Homo sapiens
  source 1..20: mol_type = genomic RNA
ctgctcatctatacacggtt

SEQ ID NO: 3664 - RNA, 20 nt, Homo sapiens
  source 1..20: mol_type = genomic RNA
tgctcatctatacacggtta

SEQ ID NO: 3665 - RNA, 20 nt, Homo sapiens
  source 1..20: mol_type = genomic RNA
gctcatctatacacggttac

SEQ ID NO: 3666 - RNA, 20 nt, Homo sapiens
  source 1..20: mol_type = genomic RNA
ctcatctatacacggttacc

SEQ ID NO: 3667 - RNA, 20 nt, Homo sapiens
  source 1..20: mol_type = genomic RNA
tcatctatacacggttaccc

SEQ ID NO: 3668 - RNA, 20 nt, Homo sapiens
  source 1..20: mol_type = genomic RNA
catctatacacggttaccca

SEQ ID NO: 3669 - RNA, 20 nt, Homo sapiens
  source 1..20: mol_type = genomic RNA
atctatacacggttacccag

SEQ ID NO: 3670 - RNA, 20 nt, Homo sapiens
  source 1..20: mol_type = genomic RNA
tctatacacggttacccaga

SEQ ID NO: 3671 - RNA, 20 nt, Homo sapiens
  source 1..20: mol_type = genomic RNA
ctatacacggttacccagaa

SEQ ID NO: 3672 - RNA, 20 nt, Homo sapiens
  source 1..20: mol_type = genomic RNA
tatacacggttacccagaac

SEQ ID NO: 3673 - RNA, 20 nt, Homo sapiens
  source 1..20: mol_type = genomic RNA
atacacggttacccagaacc

SEQ ID NO: 3674 - RNA, 20 nt, Homo sapiens
  source 1..20: mol_type = genomic RNA
tacacggttacccagaacct

SEQ ID NO: 3675 - RNA, 20 nt, Homo sapiens
  source 1..20: mol_type = genomic RNA
acacggttacccagaaccta

SEQ ID NO: 3676 - RNA, 20 nt, Homo sapiens
  source 1..20: mol_type = genomic RNA
cacggttacccagaacctaa

SEQ ID NO: 3677 - RNA, 20 nt, Homo sapiens
  source 1..20: mol_type = genomic RNA
acggttacccagaacctaag

SEQ ID NO: 3678 - RNA, 20 nt, Homo sapiens
  source 1..20: mol_type = genomic RNA
cggttacccagaacctaaga

SEQ ID NO: 3679 - RNA, 20 nt, Homo sapiens
  source 1..20: mol_type = genomic RNA
ggttacccagaacctaagaa

SEQ ID NO: 3680 - RNA, 20 nt, Homo sapiens
  source 1..20: mol_type = genomic RNA
gttacccagaacctaagaag

SEQ ID NO: 3681 - RNA, 20 nt, Homo sapiens
  source 1..20: mol_type = genomic RNA
ttacccagaacctaagaaga

SEQ ID NO: 3682 - RNA, 20 nt, Homo sapiens
  source 1..20: mol_type = genomic RNA
tacccagaacctaagaagat

SEQ ID NO: 3683 - RNA, 20 nt, Homo sapiens
  source 1..20: mol_type = genomic RNA
acccagaacctaagaagatg

SEQ ID NO: 3684 - RNA, 20 nt, Homo sapiens
  source 1..20: mol_type = genomic RNA
cccagaacctaagaagatga

SEQ ID NO: 3685 - RNA, 20 nt, Homo sapiens
  source 1..20: mol_type = genomic RNA
ccagaacctaagaagatgag

SEQ ID NO: 3686 - RNA, 20 nt, Homo sapiens
  source 1..20: mol_type = genomic RNA
cagaacctaagaagatgagt

SEQ ID NO: 3687 - RNA, 20 nt, Homo sapiens
  source 1..20: mol_type = genomic RNA
agaacctaagaagatgagtg

SEQ ID NO: 3688 - RNA, 20 nt, Homo sapiens
  source 1..20: mol_type = genomic RNA
gaacctaagaagatgagtgt

SEQ ID NO: 3689 - RNA, 20 nt, Homo sapiens
  source 1..20: mol_type = genomic RNA
aacctaagaagatgagtgtt

SEQ ID NO: 3690 - RNA, 20 nt, Homo sapiens
  source 1..20: mol_type = genomic RNA
acctaagaagatgagtgttt

SEQ ID NO: 3691 - RNA, 20 nt, Homo sapiens
  source 1..20: mol_type = genomic RNA
cctaagaagatgagtgtttt

SEQ ID NO: 3692 - RNA, 20 nt, Homo sapiens
  source 1..20: mol_type = genomic RNA
ctaagaagatgagtgttttg

SEQ ID NO: 3693 - RNA, 20 nt, Homo sapiens
  source 1..20: mol_type = genomic RNA
taagaagatgagtgttttgc

SEQ ID NO: 3694 - RNA, 20 nt, Homo sapiens
  source 1..20: mol_type = genomic RNA
aagaagatgagtgttttgct

SEQ ID NO: 3695 - RNA, 20 nt, Homo sapiens
  source 1..20: mol_type = genomic RNA
agaagatgagtgttttgcta

SEQ ID NO: 3696 - RNA, 20 nt, Homo sapiens
  source 1..20: mol_type = genomic RNA
gaagatgagtgttttgctaa

SEQ ID NO: 3697 - RNA, 20 nt, Homo sapiens
  source 1..20: mol_type = genomic RNA
aagatgagtgttttgctaag

SEQ ID NO: 3698 - RNA, 20 nt, Homo sapiens
  source 1..20: mol_type = genomic RNA
agatgagtgttttgctaaga

SEQ ID NO: 3699 - RNA, 20 nt, Homo sapiens
  source 1..20: mol_type = genomic RNA
gatgagtgttttgctaagaa

SEQ ID NO: 3700 - RNA, 20 nt, Homo sapiens
  source 1..20: mol_type = genomic RNA
atgagtgttttgctaagaac

SEQ ID NO: 3701 - RNA, 20 nt, Homo sapiens
  source 1..20: mol_type = genomic RNA
tgagtgttttgctaagaacc

SEQ ID NO: 3702 - RNA, 20 nt, Homo sapiens
  source 1..20: mol_type = genomic RNA
gagtgttttgctaagaacca

SEQ ID NO: 3703 - RNA, 20 nt, Homo sapiens
  source 1..20: mol_type = genomic RNA
agtgttttgctaagaaccaa

SEQ ID NO: 3704 - RNA, 20 nt, Homo sapiens
  source 1..20: mol_type = genomic RNA
gtgttttgctaagaaccaag

SEQ ID NO: 3705 - RNA, 20 nt, Homo sapiens
  source 1..20: mol_type = genomic RNA
tgttttgctaagaaccaaga

SEQ ID NO: 3706 - RNA, 20 nt, Homo sapiens
  source 1..20: mol_type = genomic RNA
gttttgctaagaaccaagaa

SEQ ID NO: 3707 - RNA, 20 nt, Homo sapiens
  source 1..20: mol_type = genomic RNA
ttttgctaagaaccaagaat

SEQ ID NO: 3708 - RNA, 20 nt, Homo sapiens
  source 1..20: mol_type = genomic RNA
tttgctaagaaccaagaatt

SEQ ID NO: 3709 - RNA, 20 nt, Homo sapiens
  source 1..20: mol_type = genomic RNA
ttgctaagaaccaagaattc

SEQ ID NO: 3710 - RNA, 20 nt, Homo sapiens
  source 1..20: mol_type = genomic RNA
tgctaagaaccaagaattca

SEQ ID NO: 3711 - RNA, 20 nt, Homo sapiens
  source 1..20: mol_type = genomic RNA
gctaagaaccaagaattcaa

SEQ ID NO: 3712 - RNA, 20 nt, Homo sapiens
  source 1..20: mol_type = genomic RNA
ctaagaaccaagaattcaac

SEQ ID NO: 3713 - RNA, 20 nt, Homo sapiens
  source 1..20: mol_type = genomic RNA
taagaaccaagaattcaact

SEQ ID NO: 3714 - RNA, 20 nt, Homo sapiens
  source 1..20: mol_type = genomic RNA
aagaaccaagaattcaacta

SEQ ID NO: 3715 - RNA, 20 nt, Homo sapiens
  source 1..20: mol_type = genomic RNA
agaaccaagaattcaactat

SEQ ID NO: 3716 - RNA, 20 nt, Homo sapiens
  source 1..20: mol_type = genomic RNA
gaaccaagaattcaactatc

SEQ ID NO: 3717 - RNA, 20 nt, Homo sapiens
  source 1..20: mol_type = genomic RNA
aaccaagaattcaactatcg

SEQ ID NO: 3718 - RNA, 20 nt, Homo sapiens
  source 1..20: mol_type = genomic RNA
accaagaattcaactatcga

SEQ ID NO: 3719 - RNA, 20 nt, Homo sapiens
  source 1..20: mol_type = genomic RNA
ccaagaattcaactatcgag

SEQ ID NO: 3720 - RNA, 20 nt, Homo sapiens
  source 1..20: mol_type = genomic RNA
caagaattcaactatcgagt

SEQ ID NO: 3721 - RNA, 20 nt, Homo sapiens
  source 1..20: mol_type = genomic RNA
aagaattcaactatcgagta

SEQ ID NO: 3722 - RNA, 20 nt, Homo sapiens
  source 1..20: mol_type = genomic RNA
agaattcaactatcgagtat

SEQ ID NO: 3723 - RNA, 20 nt, Homo sapiens
  source 1..20: mol_type = genomic RNA
gaattcaactatcgagtatg

SEQ ID NO: 3724 - RNA, 20 nt, Homo sapiens
  source 1..20: mol_type = genomic RNA
aattcaactatcgagtatga

SEQ ID NO: 3725 - RNA, 20 nt, Homo sapiens
  source 1..20: mol_type = genomic RNA
attcaactatcgagtatgat

SEQ ID NO: 3726 - RNA, 20 nt, Homo sapiens
  source 1..20: mol_type = genomic RNA
ttcaactatcgagtatgatg

SEQ ID NO: 3727 - RNA, 20 nt, Homo sapiens
  source 1..20: mol_type = genomic RNA
tcaactatcgagtatgatgg

SEQ ID NO: 3728 - RNA, 20 nt, Homo sapiens
  source 1..20: mol_type = genomic RNA
caactatcgagtatgatggt

SEQ ID NO: 3729 - RNA, 20 nt, Homo sapiens
  source 1..20: mol_type = genomic RNA
aactatcgagtatgatggta

SEQ ID NO: 3730 - RNA, 20 nt, Homo sapiens
  source 1..20: mol_type = genomic RNA
actatcgagtatgatggtat

SEQ ID NO: 3731 - RNA, 20 nt, Homo sapiens
  source 1..20: mol_type = genomic RNA
ctatcgagtatgatggtatt

SEQ ID NO: 3732 - RNA, 20 nt, Homo sapiens
  source 1..20: mol_type = genomic RNA
tatcgagtatgatggtatta

SEQ ID NO: 3733 - RNA, 20 nt, Homo sapiens
  source 1..20: mol_type = genomic RNA
atcgagtatgatggtattat

SEQ ID NO: 3734 - RNA, 20 nt, Homo sapiens
  source 1..20: mol_type = genomic RNA
tcgagtatgatggtattatg

SEQ ID NO: 3735 - RNA, 20 nt, Homo sapiens
  source 1..20: mol_type = genomic RNA
cgagtatgatggtattatgc

SEQ ID NO: 3736 - RNA, 20 nt, Homo sapiens
  source 1..20: mol_type = genomic RNA
gagtatgatggtattatgca

SEQ ID NO: 3737 - RNA, 20 nt, Homo sapiens
  source 1..20: mol_type = genomic RNA
agtatgatggtattatgcag

SEQ ID NO: 3738 - RNA, 20 nt, Homo sapiens
  source 1..20: mol_type = genomic RNA
gtatgatggtattatgcaga

SEQ ID NO: 3739 - RNA, 20 nt, Homo sapiens
  source 1..20: mol_type = genomic RNA
tatgatggtattatgcagaa

SEQ ID NO: 3740 - RNA, 20 nt, Homo sapiens
  source 1..20: mol_type = genomic RNA
atgatggtattatgcagaaa

SEQ ID NO: 3741 - RNA, 20 nt, Homo sapiens
  source 1..20: mol_type = genomic RNA
tgatggtattatgcagaaat

SEQ ID NO: 3742 - RNA, 20 nt, Homo sapiens
  source 1..20: mol_type = genomic RNA
gatggtattatgcagaaatc

SEQ ID NO: 3743 - RNA, 20 nt, Homo sapiens
  source 1..20: mol_type = genomic RNA
atggtattatgcagaaatct

SEQ ID NO: 3744 - RNA, 20 nt, Homo sapiens
  source 1..20: mol_type = genomic RNA
tggtattatgcagaaatctc

SEQ ID NO: 3745 - RNA, 20 nt, Homo sapiens
  source 1..20: mol_type = genomic RNA
ggtattatgcagaaatctca

SEQ ID NO: 3746 - RNA, 20 nt, Homo sapiens
  source 1..20: mol_type = genomic RNA
gtattatgcagaaatctcaa

SEQ ID NO: 3747 - RNA, 20 nt, Homo sapiens
  source 1..20: mol_type = genomic RNA
tattatgcagaaatctcaag

SEQ ID NO: 3748 - RNA, 20 nt, Homo sapiens
  source 1..20: mol_type = genomic RNA
attatgcagaaatctcaaga

SEQ ID NO: 3749 - RNA, 20 nt, Homo sapiens
  source 1..20: mol_type = genomic RNA
ttatgcagaaatctcaagat

SEQ ID NO: 3750 - RNA, 20 nt, Homo sapiens
  source 1..20: mol_type = genomic RNA
tatgcagaaatctcaagata

SEQ ID NO: 3751 - RNA, 20 nt, Homo sapiens
  source 1..20: mol_type = genomic RNA
atgcagaaatctcaagataa

SEQ ID NO: 3752 - RNA, 20 nt, Homo sapiens
  source 1..20: mol_type = genomic RNA
tgcagaaatctcaagataat

SEQ ID NO: 3753 - RNA, 20 nt, Homo sapiens
  source 1..20: mol_type = genomic RNA
gcagaaatctcaagataatg

SEQ ID NO: 3754 - RNA, 20 nt, Homo sapiens
  source 1..20: mol_type = genomic RNA
cagaaatctcaagataatgt

SEQ ID NO: 3755 - RNA, 20 nt, Homo sapiens
  source 1..20: mol_type = genomic RNA
agaaatctcaagataatgtc

SEQ ID NO: 3756 - RNA, 20 nt, Homo sapiens
  source 1..20: mol_type = genomic RNA
gaaatctcaagataatgtca

SEQ ID NO: 3757 - RNA, 20 nt, Homo sapiens
  source 1..20: mol_type = genomic RNA
aaatctcaagataatgtcac

SEQ ID NO: 3758 - RNA, 20 nt, Homo sapiens
  source 1..20: mol_type = genomic RNA
aatctcaagataatgtcaca

SEQ ID NO: 3759 - RNA, 20 nt, Homo sapiens
  source 1..20: mol_type = genomic RNA
atctcaagataatgtcacag

SEQ ID NO: 3760 - RNA, 20 nt, Homo sapiens
  source 1..20: mol_type = genomic RNA
tctcaagataatgtcacaga

SEQ ID NO: 3761 - RNA, 20 nt, Homo sapiens
  source 1..20: mol_type = genomic RNA
ctcaagataatgtcacagaa

SEQ ID NO: 3762 - RNA, 20 nt, Homo sapiens
  source 1..20: mol_type = genomic RNA
tcaagataatgtcacagaac

SEQ ID NO: 3763 - RNA, 20 nt, Homo sapiens
  source 1..20: mol_type = genomic RNA
caagataatgtcacagaact

SEQ ID NO: 3764 - RNA, 20 nt, Homo sapiens
  source 1..20: mol_type = genomic RNA
aagataatgtcacagaactg

SEQ ID NO: 3765 - RNA, 20 nt, Homo sapiens
  source 1..20: mol_type = genomic RNA
agataatgtcacagaactgt

SEQ ID NO: 3766 - RNA, 20 nt, Homo sapiens
  source 1..20: mol_type = genomic RNA
gataatgtcacagaactgta

SEQ ID NO: 3767 - RNA, 20 nt, Homo sapiens
  source 1..20: mol_type = genomic RNA
ataatgtcacagaactgtac

SEQ ID NO: 3768 - RNA, 20 nt, Homo sapiens
  source 1..20: mol_type = genomic RNA
taatgtcacagaactgtacg

SEQ ID NO: 3769 - RNA, 20 nt, Homo sapiens
  source 1..20: mol_type = genomic RNA
aatgtcacagaactgtacga

SEQ ID NO: 3770 - RNA, 20 nt, Homo sapiens
  source 1..20: mol_type = genomic RNA
atgtcacagaactgtacgac

SEQ ID NO: 3771 - RNA, 20 nt, Homo sapiens
  source 1..20: mol_type = genomic RNA
tgtcacagaactgtacgacg

SEQ ID NO: 3772 - RNA, 20 nt, Homo sapiens
  source 1..20: mol_type = genomic RNA
gtcacagaactgtacgacgt

SEQ ID NO: 3773 - RNA, 20 nt, Homo sapiens
  source 1..20: mol_type = genomic RNA
tcacagaactgtacgacgtt

SEQ ID NO: 3774 - RNA, 20 nt, Homo sapiens
  source 1..20: mol_type = genomic RNA
cacagaactgtacgacgttt

SEQ ID NO: 3775 - RNA, 20 nt, Homo sapiens
  source 1..20: mol_type = genomic RNA
acagaactgtacgacgtttc

SEQ ID NO: 3776 - RNA, 20 nt, Homo sapiens
  source 1..20: mol_type = genomic RNA
cagaactgtacgacgtttcc

SEQ ID NO: 3777 - RNA, 20 nt, Homo sapiens
  source 1..20: mol_type = genomic RNA
agaactgtacgacgtttcca

SEQ ID NO: 3778 - RNA, 20 nt, Homo sapiens
  source 1..20: mol_type = genomic RNA
gaactgtacgacgtttccat

SEQ ID NO: 3779 - RNA, 20 nt, Homo sapiens
  source 1..20: mol_type = genomic RNA
aactgtacgacgtttccatc

SEQ ID NO: 3780 - RNA, 20 nt, Homo sapiens
  source 1..20: mol_type = genomic RNA
actgtacgacgtttccatca

SEQ ID NO: 3781 - RNA, 20 nt, Homo sapiens
  source 1..20: mol_type = genomic RNA
ctgtacgacgtttccatcag

SEQ ID NO: 3782 - RNA, 20 nt, Homo sapiens
  source 1..20: mol_type = genomic RNA
tgtacgacgtttccatcagc

SEQ ID NO: 3783 - RNA, 20 nt, Homo sapiens
  source 1..20: mol_type = genomic RNA
gtacgacgtttccatcagct

SEQ ID NO: 3784 - RNA, 20 nt, Homo sapiens
  source 1..20: mol_type = genomic RNA
tacgacgtttccatcagctt

SEQ ID NO: 3785 - RNA, 20 nt, Homo sapiens
  source 1..20: mol_type = genomic RNA
acgacgtttccatcagcttg

SEQ ID NO: 3786 - RNA, 20 nt, Homo sapiens
  source 1..20: mol_type = genomic RNA
cgacgtttccatcagcttgt

SEQ ID NO: 3787 - RNA, 20 nt, Homo sapiens
  source 1..20: mol_type = genomic RNA
gacgtttccatcagcttgtc

SEQ ID NO: 3788 - RNA, 20 nt, Homo sapiens
  source 1..20: mol_type = genomic RNA
acgtttccatcagcttgtct

SEQ ID NO: 3789 - RNA, 20 nt, Homo sapiens
  source 1..20: mol_type = genomic RNA
cgtttccatcagcttgtctg

SEQ ID NO: 3790 - RNA, 20 nt, Homo sapiens
  source 1..20: mol_type = genomic RNA
gtttccatcagcttgtctgt

SEQ ID NO: 3791 - RNA, 20 nt, Homo sapiens
  source 1..20: mol_type = genomic RNA
tttccatcagcttgtctgtt

SEQ ID NO: 3792 - RNA, 20 nt, Homo sapiens
  source 1..20: mol_type = genomic RNA
ttccatcagcttgtctgttt

SEQ ID NO: 3793 - RNA, 20 nt, Homo sapiens
  source 1..20: mol_type = genomic RNA
tccatcagcttgtctgtttc

SEQ ID NO: 3794 - RNA, 20 nt, Homo sapiens
  source 1..20: mol_type = genomic RNA
ccatcagcttgtctgtttca

SEQ ID NO: 3795 - RNA, 20 nt, Homo sapiens
  source 1..20: mol_type = genomic RNA
catcagcttgtctgtttcat

SEQ ID NO: 3796 - RNA, 20 nt, Homo sapiens
  source 1..20: mol_type = genomic RNA
atcagcttgtctgtttcatt

SEQ ID NO: 3797 - RNA, 20 nt, Homo sapiens
  source 1..20: mol_type = genomic RNA
tcagcttgtctgtttcattc

SEQ ID NO: 3798 - RNA, 20 nt, Homo sapiens
  source 1..20: mol_type = genomic RNA
cagcttgtctgtttcattcc

SEQ ID NO: 3799 - RNA, 20 nt, Homo sapiens
  source 1..20: mol_type = genomic RNA
agcttgtctgtttcattccc

SEQ ID NO: 3800 - RNA, 20 nt, Homo sapiens
  source 1..20: mol_type = genomic RNA
gcttgtctgtttcattccct

SEQ ID NO: 3801 - RNA, 20 nt, Homo sapiens
  source 1..20: mol_type = genomic RNA
cttgtctgtttcattccctg

SEQ ID NO: 3802 - RNA, 20 nt, Homo sapiens
  source 1..20: mol_type = genomic RNA
ttgtctgtttcattccctga

SEQ ID NO: 3803 - RNA, 20 nt, Homo sapiens
  source 1..20: mol_type = genomic RNA
tgtctgtttcattccctgat

SEQ ID NO: 3804 - RNA, 20 nt, Homo sapiens
  source 1..20: mol_type = genomic RNA
gtctgtttcattccctgatg

SEQ ID NO: 3805 - RNA, 20 nt, Homo sapiens
  source 1..20: mol_type = genomic RNA
tctgtttcattccctgatgt

SEQ ID NO: 3806 - RNA, 20 nt, Homo sapiens
  source 1..20: mol_type = genomic RNA
ctgtttcattccctgatgtt

SEQ ID NO: 3807 - RNA, 20 nt, Homo sapiens
  source 1..20: mol_type = genomic RNA
tgtttcattccctgatgtta

SEQ ID NO: 3808 - RNA, 20 nt, Homo sapiens
  source 1..20: mol_type = genomic RNA
gtttcattccctgatgttac

SEQ ID NO: 3809 - RNA, 20 nt, Homo sapiens
  source 1..20: mol_type = genomic RNA
tttcattccctgatgttacg

SEQ ID NO: 3810 - RNA, 20 nt, Homo sapiens
  source 1..20: mol_type = genomic RNA
ttcattccctgatgttacga

SEQ ID NO: 3811 - RNA, 20 nt, Homo sapiens
  source 1..20: mol_type = genomic RNA
tcattccctgatgttacgag

SEQ ID NO: 3812 - RNA, 20 nt, Homo sapiens
  source 1..20: mol_type = genomic RNA
cattccctgatgttacgagc

SEQ ID NO: 3813 - RNA, 20 nt, Homo sapiens
  source 1..20: mol_type = genomic RNA
attccctgatgttacgagca

SEQ ID NO: 3814 - RNA, 20 nt, Homo sapiens
  source 1..20: mol_type = genomic RNA
ttccctgatgttacgagcaa

SEQ ID NO: 3815 - RNA, 20 nt, Homo sapiens
  source 1..20: mol_type = genomic RNA
tccctgatgttacgagcaat

SEQ ID NO: 3816 - RNA, 20 nt, Homo sapiens
  source 1..20: mol_type = genomic RNA
ccctgatgttacgagcaata

SEQ ID NO: 3817 - RNA, 20 nt, Homo sapiens
  source 1..20: mol_type = genomic RNA
cctgatgttacgagcaatat

SEQ ID NO: 3818 - RNA, 20 nt, Homo sapiens
  source 1..20: mol_type = genomic RNA
ctgatgttacgagcaatatg

SEQ ID NO: 3819 - RNA, 20 nt, Homo sapiens
  source 1..20: mol_type = genomic RNA
tgatgttacgagcaatatga

SEQ ID NO: 3820 - RNA, 20 nt, Homo sapiens
  source 1..20: mol_type = genomic RNA
gatgttacgagcaatatgac

SEQ ID NO: 3821 - RNA, 20 nt, Homo sapiens
  source 1..20: mol_type = genomic RNA
atgttacgagcaatatgacc

SEQ ID NO: 3822 - RNA, 20 nt, Homo sapiens
  source 1..20: mol_type = genomic RNA
tgttacgagcaatatgacca

SEQ ID NO: 3823 - RNA, 20 nt, Homo sapiens
  source 1..20: mol_type = genomic RNA
gttacgagcaatatgaccat

SEQ ID NO: 3824 - RNA, 20 nt, Homo sapiens
  source 1..20: mol_type = genomic RNA
ttacgagcaatatgaccatc

SEQ ID NO: 3825 - RNA, 20 nt, Homo sapiens
  source 1..20: mol_type = genomic RNA
tacgagcaatatgaccatct

SEQ ID NO: 3826 - RNA, 20 nt, Homo sapiens
  source 1..20: mol_type = genomic RNA
acgagcaatatgaccatctt

SEQ ID NO: 3827 - RNA, 20 nt, Homo sapiens
  source 1..20: mol_type = genomic RNA
cgagcaatatgaccatcttc

SEQ ID NO: 3828 - RNA, 20 nt, Homo sapiens
  source 1..20: mol_type = genomic RNA
gagcaatatgaccatcttct

SEQ ID NO: 3829 - RNA, 20 nt, Homo sapiens
  source 1..20: mol_type = genomic RNA
agcaatatgaccatcttctg

SEQ ID NO: 3830 - RNA, 20 nt, Homo sapiens
  source 1..20: mol_type = genomic RNA
gcaatatgaccatcttctgt

SEQ ID NO: 3831 - RNA, 20 nt, Homo sapiens
  source 1..20: mol_type = genomic RNA
caatatgaccatcttctgta

SEQ ID NO: 3832 - RNA, 20 nt, Homo sapiens
  source 1..20: mol_type = genomic RNA
aatatgaccatcttctgtat

SEQ ID NO: 3833 - RNA, 20 nt, Homo sapiens
  source 1..20: mol_type = genomic RNA
atatgaccatcttctgtatt

SEQ ID NO: 3834 - RNA, 20 nt, Homo sapiens
  source 1..20: mol_type = genomic RNA
tatgaccatcttctgtattc

SEQ ID NO: 3835 - RNA, 20 nt, Homo sapiens
  source 1..20: mol_type = genomic RNA
atgaccatcttctgtattct

SEQ ID NO: 3836 - RNA, 20 nt, Homo sapiens
  source 1..20: mol_type = genomic RNA
tgaccatcttctgtattctg

SEQ ID NO: 3837 - RNA, 20 nt, Homo sapiens
  source 1..20: mol_type = genomic RNA
gaccatcttctgtattctgg

SEQ ID NO: 3838 - RNA, 20 nt, Homo sapiens
  source 1..20: mol_type = genomic RNA
accatcttctgtattctgga

SEQ ID NO: 3839 - RNA, 20 nt, Homo sapiens
  source 1..20: mol_type = genomic RNA
ccatcttctgtattctggaa

SEQ ID NO: 3840 - RNA, 20 nt, Homo sapiens
  source 1..20: mol_type = genomic RNA
catcttctgtattctggaaa

SEQ ID NO: 3841 - RNA, 20 nt, Homo sapiens
  source 1..20: mol_type = genomic RNA
atcttctgtattctggaaac

SEQ ID NO: 3842 - RNA, 20 nt, Homo sapiens
  source 1..20: mol_type = genomic RNA
tcttctgtattctggaaact

SEQ ID NO: 3843 - RNA, 20 nt, Homo sapiens
  source 1..20: mol_type = genomic RNA
cttctgtattctggaaactg

SEQ ID NO: 3844 - RNA, 20 nt, Homo sapiens
  source 1..20: mol_type = genomic RNA
ttctgtattctggaaactga

SEQ ID NO: 3845 - RNA, 20 nt, Homo sapiens
  source 1..20: mol_type = genomic RNA
tctgtattctggaaactgac

SEQ ID NO: 3846 - RNA, 20 nt, Homo sapiens
  source 1..20: mol_type = genomic RNA
ctgtattctggaaactgaca

SEQ ID NO: 3847 - RNA, 20 nt, Homo sapiens
  source 1..20: mol_type = genomic RNA
tgtattctggaaactgacaa

SEQ ID NO: 3848 - RNA, 20 nt, Homo sapiens
  source 1..20: mol_type = genomic RNA
gtattctggaaactgacaag

SEQ ID NO: 3849 - RNA, 20 nt, Homo sapiens
  source 1..20: mol_type = genomic RNA
tattctggaaactgacaaga

SEQ ID NO: 3850 - RNA, 20 nt, Homo sapiens
  source 1..20: mol_type = genomic RNA
attctggaaactgacaagac

SEQ ID NO: 3851 - RNA, 20 nt, Homo sapiens
  source 1..20: mol_type = genomic RNA
ttctggaaactgacaagacg

SEQ ID NO: 3852 - RNA, 20 nt, Homo sapiens
  source 1..20: mol_type = genomic RNA
tctggaaactgacaagacgc

SEQ ID NO: 3853 - RNA, 20 nt, Homo sapiens
  source 1..20: mol_type = genomic RNA
ctggaaactgacaagacgcg

SEQ ID NO: 3854 - RNA, 20 nt, Homo sapiens
  source 1..20: mol_type = genomic RNA
tggaaactgacaagacgcgg

SEQ ID NO: 3855 - RNA, 20 nt, Homo sapiens
  source 1..20: mol_type = genomic RNA
ggaaactgacaagacgcggc

SEQ ID NO: 3856 - RNA, 20 nt, Homo sapiens
  source 1..20: mol_type = genomic RNA
gaaactgacaagacgcggct

SEQ ID NO: 3857 - RNA, 20 nt, Homo sapiens
  source 1..20: mol_type = genomic RNA
aaactgacaagacgcggctt

SEQ ID NO: 3858 - RNA, 20 nt, Homo sapiens
  source 1..20: mol_type = genomic RNA
aactgacaagacgcggcttt

SEQ ID NO: 3859 - RNA, 20 nt, Homo sapiens
  source 1..20: mol_type = genomic RNA
actgacaagacgcggctttt

SEQ ID NO: 3860 - RNA, 20 nt, Homo sapiens
  source 1..20: mol_type = genomic RNA
ctgacaagacgcggctttta

SEQ ID NO: 3861 - RNA, 20 nt, Homo sapiens
  source 1..20: mol_type = genomic RNA
tgacaagacgcggcttttat

SEQ ID NO: 3862 - RNA, 20 nt, Homo sapiens
  source 1..20: mol_type = genomic RNA
gacaagacgcggcttttatc

SEQ ID NO: 3863 - RNA, 20 nt, Homo sapiens
  source 1..20: mol_type = genomic RNA
acaagacgcggcttttatct

SEQ ID NO: 3864 - RNA, 20 nt, Homo sapiens
  source 1..20: mol_type = genomic RNA
caagacgcggcttttatctt

SEQ ID NO: 3865 - RNA, 20 nt, Homo sapiens
  source 1..20: mol_type = genomic RNA
aagacgcggcttttatcttc

SEQ ID NO: 3866 - RNA, 20 nt, Homo sapiens
  source 1..20: mol_type = genomic RNA
agacgcggcttttatcttca

SEQ ID NO: 3867 - RNA, 20 nt, Homo sapiens
  source 1..20: mol_type = genomic RNA
gacgcggcttttatcttcac

SEQ ID NO: 3868 - RNA, 20 nt, Homo sapiens
  source 1..20: mol_type = genomic RNA
acgcggcttttatcttcacc

SEQ ID NO: 3869 - RNA, 20 nt, Homo sapiens
  source 1..20: mol_type = genomic RNA
cgcggcttttatcttcacct

SEQ ID NO: 3870 - RNA, 20 nt, Homo sapiens
  source 1..20: mol_type = genomic RNA
gcggcttttatcttcacctt

SEQ ID NO: 3871 - RNA, 20 nt, Homo sapiens
  source 1..20: mol_type = genomic RNA
cggcttttatcttcaccttt

SEQ ID NO: 3872 - RNA, 20 nt, Homo sapiens
  source 1..20: mol_type = genomic RNA
ggcttttatcttcacctttc

SEQ ID NO: 3873 - RNA, 20 nt, Homo sapiens
  source 1..20: mol_type = genomic RNA
gcttttatcttcacctttct

SEQ ID NO: 3874 - RNA, 20 nt, Homo sapiens
  source 1..20: mol_type = genomic RNA
cttttatcttcacctttctc

SEQ ID NO: 3875 - RNA, 20 nt, Homo sapiens
  source 1..20: mol_type = genomic RNA
ttttatcttcacctttctct

SEQ ID NO: 3876 - RNA, 20 nt, Homo sapiens
  source 1..20: mol_type = genomic RNA
tttatcttcacctttctcta

SEQ ID NO: 3877 - RNA, 20 nt, Homo sapiens
  source 1..20: mol_type = genomic RNA
ttatcttcacctttctctat

SEQ ID NO: 3878 - RNA, 20 nt, Homo sapiens
  source 1..20: mol_type = genomic RNA
tatcttcacctttctctata

SEQ ID NO: 3879 - RNA, 20 nt, Homo sapiens
  source 1..20: mol_type = genomic RNA
atcttcacctttctctatag

SEQ ID NO: 3880 - RNA, 20 nt, Homo sapiens
  source 1..20: mol_type = genomic RNA
tcttcacctttctctataga

SEQ ID NO: 3881 - RNA, 20 nt, Homo sapiens
  source 1..20: mol_type = genomic RNA
cttcacctttctctatagag

SEQ ID NO: 3882 - RNA, 20 nt, Homo sapiens
  source 1..20: mol_type = genomic RNA
ttcacctttctctatagagc

SEQ ID NO: 3883 - RNA, 20 nt, Homo sapiens
  source 1..20: mol_type = genomic RNA
tcacctttctctatagagct

SEQ ID NO: 3884 - RNA, 20 nt, Homo sapiens
  source 1..20: mol_type = genomic RNA
cacctttctctatagagctt

SEQ ID NO: 3885 - RNA, 20 nt, Homo sapiens
  source 1..20: mol_type = genomic RNA
acctttctctatagagcttg

SEQ ID NO: 3886 - RNA, 20 nt, Homo sapiens
  source 1..20: mol_type = genomic RNA
cctttctctatagagcttga

SEQ ID NO: 3887 - RNA, 20 nt, Homo sapiens
  source 1..20: mol_type = genomic RNA
ctttctctatagagcttgag

SEQ ID NO: 3888 - RNA, 20 nt, Homo sapiens
  source 1..20: mol_type = genomic RNA
tttctctatagagcttgagg

SEQ ID NO: 3889 - RNA, 20 nt, Homo sapiens
  source 1..20: mol_type = genomic RNA
ttctctatagagcttgagga

SEQ ID NO: 3890 - RNA, 20 nt, Homo sapiens
  source 1..20: mol_type = genomic RNA
tctctatagagcttgaggac

SEQ ID NO: 3891 - RNA, 20 nt, Homo sapiens
  source 1..20: mol_type = genomic RNA
ctctatagagcttgaggacc

SEQ ID NO: 3892 - RNA, 20 nt, Homo sapiens
  source 1..20: mol_type = genomic RNA
tctatagagcttgaggaccc

SEQ ID NO: 3893 - RNA, 20 nt, Homo sapiens
  source 1..20: mol_type = genomic RNA
ctatagagcttgaggaccct

SEQ ID NO: 3894 - RNA, 20 nt, Homo sapiens
  source 1..20: mol_type = genomic RNA
tatagagcttgaggaccctc

SEQ ID NO: 3895 - RNA, 20 nt, Homo sapiens
  source 1..20: mol_type = genomic RNA
atagagcttgaggaccctca

SEQ ID NO: 3896 - RNA, 20 nt, Homo sapiens
  source 1..20: mol_type = genomic RNA
tagagcttgaggaccctcag

SEQ ID NO: 3897 - RNA, 20 nt, Homo sapiens
  source 1..20: mol_type = genomic RNA
agagcttgaggaccctcagc

SEQ ID NO: 3898 - RNA, 20 nt, Homo sapiens
  source 1..20: mol_type = genomic RNA
gagcttgaggaccctcagcc

SEQ ID NO: 3899 - RNA, 20 nt, Homo sapiens
  source 1..20: mol_type = genomic RNA
agcttgaggaccctcagcct

SEQ ID NO: 3900 - RNA, 20 nt, Homo sapiens
  source 1..20: mol_type = genomic RNA
gcttgaggaccctcagcctc

SEQ ID NO: 3901 - RNA, 20 nt, Homo sapiens
  source 1..20: mol_type = genomic RNA
cttgaggaccctcagcctcc

SEQ ID NO: 3902 - RNA, 20 nt, Homo sapiens
  source 1..20: mol_type = genomic RNA
ttgaggaccctcagcctccc

SEQ ID NO: 3903 - RNA, 20 nt, Homo sapiens
  source 1..20: mol_type = genomic RNA
tgaggaccctcagcctcccc

SEQ ID NO: 3904 - RNA, 20 nt, Homo sapiens
  source 1..20: mol_type = genomic RNA
gaggaccctcagcctccccc

SEQ ID NO: 3905 - RNA, 20 nt, Homo sapiens
  source 1..20: mol_type = genomic RNA
aggaccctcagcctccccca

SEQ ID NO: 3906 - RNA, 20 nt, Homo sapiens
  source 1..20: mol_type = genomic RNA
ggaccctcagcctcccccag

SEQ ID NO: 3907 - RNA, 20 nt, Homo sapiens
  source 1..20: mol_type = genomic RNA
gaccctcagcctcccccaga

SEQ ID NO: 3908 - RNA, 20 nt, Homo sapiens
  source 1..20: mol_type = genomic RNA
accctcagcctcccccagac

SEQ ID NO: 3909 - RNA, 20 nt, Homo sapiens
  source 1..20: mol_type = genomic RNA
ccctcagcctcccccagacc

SEQ ID NO: 3910 - RNA, 20 nt, Homo sapiens
  source 1..20: mol_type = genomic RNA
cctcagcctcccccagacca

SEQ ID NO: 3911 - RNA, 20 nt, Homo sapiens
  source 1..20: mol_type = genomic RNA
ctcagcctcccccagaccac

SEQ ID NO: 3912 - RNA, 20 nt, Homo sapiens
  source 1..20: mol_type = genomic RNA
tcagcctcccccagaccaca

SEQ ID NO: 3913 - RNA, 20 nt, Homo sapiens
  source 1..20: mol_type = genomic RNA
cagcctcccccagaccacat

SEQ ID NO: 3914 - RNA, 20 nt, Homo sapiens
  source 1..20: mol_type = genomic RNA
agcctcccccagaccacatt

SEQ ID NO: 3915 - RNA, 20 nt, Homo sapiens
  source 1..20: mol_type = genomic RNA
gcctcccccagaccacattc

SEQ ID NO: 3916 - RNA, 20 nt, Homo sapiens
  source 1..20: mol_type = genomic RNA
cctcccccagaccacattcc

SEQ ID NO: 3917 - RNA, 20 nt, Homo sapiens
  source 1..20: mol_type = genomic RNA
ctcccccagaccacattcct

SEQ ID NO: 3918 - RNA, 20 nt, Homo sapiens
  source 1..20: mol_type = genomic RNA
tcccccagaccacattcctt

SEQ ID NO: 3919 - RNA, 20 nt, Homo sapiens
  source 1..20: mol_type = genomic RNA
cccccagaccacattccttg

SEQ ID NO: 3920 - RNA, 20 nt, Homo sapiens
  source 1..20: mol_type = genomic RNA
ccccagaccacattccttgg

SEQ ID NO: 3921 - RNA, 20 nt, Homo sapiens
  source 1..20: mol_type = genomic RNA
cccagaccacattccttgga

SEQ ID NO: 3922 - RNA, 20 nt, Homo sapiens
  source 1..20: mol_type = genomic RNA
ccagaccacattccttggat

SEQ ID NO: 3923 - RNA, 20 nt, Homo sapiens
  source 1..20: mol_type = genomic RNA
cagaccacattccttggatt

SEQ ID NO: 3924 - RNA, 20 nt, Homo sapiens
  source 1..20: mol_type = genomic RNA
agaccacattccttggatta

SEQ ID NO: 3925 - RNA, 20 nt, Homo sapiens
  source 1..20: mol_type = genomic RNA
gaccacattccttggattac

SEQ ID NO: 3926 - RNA, 20 nt, Homo sapiens
  source 1..20: mol_type = genomic RNA
accacattccttggattaca

SEQ ID NO: 3927 - RNA, 20 nt, Homo sapiens
  source 1..20: mol_type = genomic RNA
ccacattccttggattacag

SEQ ID NO: 3928 - RNA, 20 nt, Homo sapiens
  source 1..20: mol_type = genomic RNA
cacattccttggattacagc

SEQ ID NO: 3929 - RNA, 20 nt, Homo sapiens
  source 1..20: mol_type = genomic RNA
acattccttggattacagct

SEQ ID NO: 3930 - RNA, 20 nt, Homo sapiens
  source 1..20: mol_type = genomic RNA
cattccttggattacagctg

SEQ ID NO: 3931 - RNA, 20 nt, Homo sapiens
  source 1..20: mol_type = genomic RNA
attccttggattacagctgt

SEQ ID NO: 3932 - RNA, 20 nt, Homo sapiens
  source 1..20: mol_type = genomic RNA
ttccttggattacagctgta

SEQ ID NO: 3933 - RNA, 20 nt, Homo sapiens
  source 1..20: mol_type = genomic RNA
tccttggattacagctgtac

SEQ ID NO: 3934 - RNA, 20 nt, Homo sapiens
  source 1..20: mol_type = genomic RNA
ccttggattacagctgtact

SEQ ID NO: 3935 - RNA, 20 nt, Homo sapiens
  source 1..20: mol_type = genomic RNA
cttggattacagctgtactt

SEQ ID NO: 3936 - RNA, 20 nt, Homo sapiens
  source 1..20: mol_type = genomic RNA
ttggattacagctgtacttc

SEQ ID NO: 3937 - RNA, 20 nt, Homo sapiens
  source 1..20: mol_type = genomic RNA
tggattacagctgtacttcc

SEQ ID NO: 3938 - RNA, 20 nt, Homo sapiens
  source 1..20: mol_type = genomic RNA
ggattacagctgtacttcca

SEQ ID NO: 3939 - RNA, 20 nt, Homo sapiens
  source 1..20: mol_type = genomic RNA
gattacagctgtacttccaa

SEQ ID NO: 3940 - RNA, 20 nt, Homo sapiens
  source 1..20: mol_type = genomic RNA
attacagctgtacttccaac

SEQ ID NO: 3941 - RNA, 20 nt, Homo sapiens
  source 1..20: mol_type = genomic RNA
ttacagctgtacttccaaca

SEQ ID NO: 3942 - RNA, 20 nt, Homo sapiens
  source 1..20: mol_type = genomic RNA
tacagctgtacttccaacag

SEQ ID NO: 3943 - RNA, 20 nt, Homo sapiens
  source 1..20: mol_type = genomic RNA
acagctgtacttccaacagt

SEQ ID NO: 3944 - RNA, 20 nt, Homo sapiens
  source 1..20: mol_type = genomic RNA
cagctgtacttccaacagtt

SEQ ID NO: 3945 - RNA, 20 nt, Homo sapiens
  source 1..20: mol_type = genomic RNA
agctgtacttccaacagtta

SEQ ID NO: 3946 - RNA, 20 nt, Homo sapiens
  source 1..20: mol_type = genomic RNA
gctgtacttccaacagttat

SEQ ID NO: 3947 - RNA, 20 nt, Homo sapiens
  source 1..20: mol_type = genomic RNA
ctgtacttccaacagttatt

SEQ ID NO: 3948 - RNA, 20 nt, Homo sapiens
  source 1..20: mol_type = genomic RNA
tgtacttccaacagttatta

SEQ ID NO: 3949 - RNA, 20 nt, Homo sapiens
  source 1..20: mol_type = genomic RNA
gtacttccaacagttattat

SEQ ID NO: 3950 - RNA, 20 nt, Homo sapiens
  source 1..20: mol_type = genomic RNA
tacttccaacagttattata

SEQ ID NO: 3951 - RNA, 20 nt, Homo sapiens
  source 1..20: mol_type = genomic RNA
acttccaacagttattatat

SEQ ID NO: 3952 - RNA, 20 nt, Homo sapiens
  source 1..20: mol_type = genomic RNA
cttccaacagttattatatg

SEQ ID NO: 3953 - RNA, 20 nt, Homo sapiens
  source 1..20: mol_type = genomic RNA
ttccaacagttattatatgt

SEQ ID NO: 3954 - RNA, 20 nt, Homo sapiens
  source 1..20: mol_type = genomic RNA
tccaacagttattatatgtg

SEQ ID NO: 3955 - RNA, 20 nt, Homo sapiens
  source 1..20: mol_type = genomic RNA
ccaacagttattatatgtgt

SEQ ID NO: 3956 - RNA, 20 nt, Homo sapiens
  source 1..20: mol_type = genomic RNA
caacagttattatatgtgtg

SEQ ID NO: 3957 - RNA, 20 nt, Homo sapiens
  source 1..20: mol_type = genomic RNA
aacagttattatatgtgtga

SEQ ID NO: 3958 - RNA, 20 nt, Homo sapiens
  source 1..20: mol_type = genomic RNA
acagttattatatgtgtgat

SEQ ID NO: 3959 - RNA, 20 nt, Homo sapiens
  source 1..20: mol_type = genomic RNA
cagttattatatgtgtgatg

SEQ ID NO: 3960 - RNA, 20 nt, Homo sapiens
  source 1..20: mol_type = genomic RNA
agttattatatgtgtgatgg

SEQ ID NO: 3961 - RNA, 20 nt, Homo sapiens
  source 1..20: mol_type = genomic RNA
gttattatatgtgtgatggt

SEQ ID NO: 3962 - RNA, 20 nt, Homo sapiens
  source 1..20: mol_type = genomic RNA
ttattatatgtgtgatggtt

SEQ ID NO: 3963 - RNA, 20 nt, Homo sapiens
  source 1..20: mol_type = genomic RNA
tattatatgtgtgatggttt

SEQ ID NO: 3964 - RNA, 20 nt, Homo sapiens
  source 1..20: mol_type = genomic RNA
attatatgtgtgatggtttt

SEQ ID NO: 3965 - RNA, 20 nt, Homo sapiens
  source 1..20: mol_type = genomic RNA
ttatatgtgtgatggttttc

SEQ ID NO: 3966 - RNA, 20 nt, Homo sapiens
  source 1..20: mol_type = genomic RNA
tatatgtgtgatggttttct

SEQ ID NO: 3967 - RNA, 20 nt, Homo sapiens
  source 1..20: mol_type = genomic RNA
atatgtgtgatggttttctg

SEQ ID NO: 3968 - RNA, 20 nt, Homo sapiens
  source 1..20: mol_type = genomic RNA
tatgtgtgatggttttctgt

SEQ ID NO: 3969 - RNA, 20 nt, Homo sapiens
  source 1..20: mol_type = genomic RNA
atgtgtgatggttttctgtc

SEQ ID NO: 3970 - RNA, 20 nt, Homo sapiens
  source 1..20: mol_type = genomic RNA
tgtgtgatggttttctgtct

SEQ ID NO: 3971 - RNA, 20 nt, Homo sapiens
  source 1..20: mol_type = genomic RNA
gtgtgatggttttctgtcta

SEQ ID NO: 3972 - RNA, 20 nt, Homo sapiens
  source 1..20: mol_type = genomic RNA
tgtgatggttttctgtctaa

SEQ ID NO: 3973 - RNA, 20 nt, Homo sapiens
  source 1..20: mol_type = genomic RNA
gtgatggttttctgtctaat

SEQ ID NO: 3974 - RNA, 20 nt, Homo sapiens
  source 1..20: mol_type = genomic RNA
tgatggttttctgtctaatt

SEQ ID NO: 3975 - RNA, 20 nt, Homo sapiens
  source 1..20: mol_type = genomic RNA
gatggttttctgtctaattc

SEQ ID NO: 3976 - RNA, 20 nt, Homo sapiens
  source 1..20: mol_type = genomic RNA
atggttttctgtctaattct

SEQ ID NO: 3977 - RNA, 20 nt, Homo sapiens
  source 1..20: mol_type = genomic RNA
tggttttctgtctaattcta

SEQ ID NO: 3978 - RNA, 20 nt, Homo sapiens
  source 1..20: mol_type = genomic RNA
ggttttctgtctaattctat

SEQ ID NO: 3979 - RNA, 20 nt, Homo sapiens
  source 1..20: mol_type = genomic RNA
gttttctgtctaattctatg

SEQ ID NO: 3980 - RNA, 20 nt, Homo sapiens
  source 1..20: mol_type = genomic RNA
ttttctgtctaattctatgg

SEQ ID NO: 3981 - RNA, 20 nt, Homo sapiens
  source 1..20: mol_type = genomic RNA
tttctgtctaattctatgga

SEQ ID NO: 3982 - RNA, 20 nt, Homo sapiens
  source 1..20: mol_type = genomic RNA
ttctgtctaattctatggaa

SEQ ID NO: 3983 - RNA, 20 nt, Homo sapiens
  source 1..20: mol_type = genomic RNA
tctgtctaattctatggaaa

SEQ ID NO: 3984 - RNA, 20 nt, Homo sapiens
  source 1..20: mol_type = genomic RNA
ctgtctaattctatggaaat

SEQ ID NO: 3985 - RNA, 20 nt, Homo sapiens
  source 1..20: mol_type = genomic RNA
tgtctaattctatggaaatg

SEQ ID NO: 3986 - RNA, 20 nt, Homo sapiens
  source 1..20: mol_type = genomic RNA
gtctaattctatggaaatgg

SEQ ID NO: 3987 - RNA, 20 nt, Homo sapiens
  source 1..20: mol_type = genomic RNA
tctaattctatggaaatgga

SEQ ID NO: 3988 - RNA, 20 nt, Homo sapiens
  source 1..20: mol_type = genomic RNA
ctaattctatggaaatggaa

SEQ ID NO: 3989 - RNA, 20 nt, Homo sapiens
  source 1..20: mol_type = genomic RNA
taattctatggaaatggaag

SEQ ID NO: 3990 - RNA, 20 nt, Homo sapiens
  source 1..20: mol_type = genomic RNA
aattctatggaaatggaaga

SEQ ID NO: 3991 - RNA, 20 nt, Homo sapiens
  source 1..20: mol_type = genomic RNA
attctatggaaatggaagaa

SEQ ID NO: 3992 - RNA, 20 nt, Homo sapiens
  source 1..20: mol_type = genomic RNA
ttctatggaaatggaagaag

SEQ ID NO: 3993 - RNA, 20 nt, Homo sapiens
  source 1..20: mol_type = genomic RNA
tctatggaaatggaagaaga

SEQ ID NO: 3994 - RNA, 20 nt, Homo sapiens
  source 1..20: mol_type = genomic RNA
ctatggaaatggaagaagaa

SEQ ID NO: 3995 - RNA, 20 nt, Homo sapiens
  source 1..20: mol_type = genomic RNA
tatggaaatggaagaagaag

SEQ ID NO: 3996 - RNA, 20 nt, Homo sapiens
  source 1..20: mol_type = genomic RNA
atggaaatggaagaagaaga

SEQ ID NO: 3997 - RNA, 20 nt, Homo sapiens
  source 1..20: mol_type = genomic RNA
tggaaatggaagaagaagaa

SEQ ID NO: 3998 - RNA, 20 nt, Homo sapiens
  source 1..20: mol_type = genomic RNA
ggaaatggaagaagaagaag

SEQ ID NO: 3999 - RNA, 20 nt, Homo sapiens
  source 1..20: mol_type = genomic RNA
gaaatggaagaagaagaagc

SEQ ID NO: 4000 - RNA, 20 nt, Homo sapiens
  source 1..20: mol_type = genomic RNA
aaatggaagaagaagaagcg

SEQ ID NO: 4001 - RNA, 20 nt, Homo sapiens
  source 1..20: mol_type = genomic RNA
aatggaagaagaagaagcgg

SEQ ID NO: 4002 - RNA, 20 nt, Homo sapiens
  source 1..20: mol_type = genomic RNA
atggaagaagaagaagcggc

SEQ ID NO: 4003 - RNA, 20 nt, Homo sapiens
  source 1..20: mol_type = genomic RNA
tggaagaagaagaagcggcc

SEQ ID NO: 4004 - RNA, 20 nt, Homo sapiens
  source 1..20: mol_type = genomic RNA
ggaagaagaagaagcggcct

SEQ ID NO: 4005 - RNA, 20 nt, Homo sapiens
  source 1..20: mol_type = genomic RNA
gaagaagaagaagcggcctc

SEQ ID NO: 4006 - RNA, 20 nt, Homo sapiens
  source 1..20: mol_type = genomic RNA
aagaagaagaagcggcctcg

SEQ ID NO: 4007 - RNA, 20 nt, Homo sapiens
  source 1..20: mol_type = genomic RNA
agaagaagaagcggcctcgc

SEQ ID NO: 4008 - RNA, 20 nt, Homo sapiens
  source 1..20: mol_type = genomic RNA
gaagaagaagcggcctcgca

SEQ ID NO: 4009 - RNA, 20 nt, Homo sapiens
  source 1..20: mol_type = genomic RNA
aagaagaagcggcctcgcaa

SEQ ID NO: 4010 - RNA, 20 nt, Homo sapiens
  source 1..20: mol_type = genomic RNA
agaagaagcggcctcgcaac

SEQ ID NO: 4011 - RNA, 20 nt, Homo sapiens
  source 1..20: mol_type = genomic RNA
gaagaagcggcctcgcaact

SEQ ID NO: 4012 - RNA, 20 nt, Homo sapiens
  source 1..20: mol_type = genomic RNA
aagaagcggcctcgcaactc

SEQ ID NO: 4013 - RNA, 20 nt, Homo sapiens
  source 1..20: mol_type = genomic RNA
agaagcggcctcgcaactct

SEQ ID NO: 4014 - RNA, 20 nt, Homo sapiens
  source 1..20: mol_type = genomic RNA
gaagcggcctcgcaactctt

SEQ ID NO: 4015 - RNA, 20 nt, Homo sapiens
  source 1..20: mol_type = genomic RNA
aagcggcctcgcaactctta

SEQ ID NO: 4016 - RNA, 20 nt, Homo sapiens
  source 1..20: mol_type = genomic RNA
agcggcctcgcaactcttat

SEQ ID NO: 4017 - RNA, 20 nt, Homo sapiens
  source 1..20: mol_type = genomic RNA
gcggcctcgcaactcttata

SEQ ID NO: 4018 - RNA, 20 nt, Homo sapiens
  source 1..20: mol_type = genomic RNA
cggcctcgcaactcttataa

SEQ ID NO: 4019 - RNA, 20 nt, Homo sapiens
  source 1..20: mol_type = genomic RNA
ggcctcgcaactcttataaa

SEQ ID NO: 4020 - RNA, 20 nt, Homo sapiens
  source 1..20: mol_type = genomic RNA
gcctcgcaactcttataaat

SEQ ID NO: 4021 - RNA, 20 nt, Homo sapiens
  source 1..20: mol_type = genomic RNA
cctcgcaactcttataaatg

SEQ ID NO: 4022 - RNA, 20 nt, Homo sapiens
  source 1..20: mol_type = genomic RNA
ctcgcaactcttataaatgt

SEQ ID NO: 4023 - RNA, 20 nt, Homo sapiens
  source 1..20: mol_type = genomic RNA
tcgcaactcttataaatgtg

SEQ ID NO: 4024 - RNA, 20 nt, Homo sapiens
  source 1..20: mol_type = genomic RNA
cgcaactcttataaatgtgg

SEQ ID NO: 4025 - RNA, 20 nt, Homo sapiens
  source 1..20: mol_type = genomic RNA
gcaactcttataaatgtgga

SEQ ID NO: 4026 - RNA, 20 nt, Homo sapiens
  source 1..20: mol_type = genomic RNA
caactcttataaatgtggaa

SEQ ID NO: 4027 - RNA, 20 nt, Homo sapiens
  source 1..20: mol_type = genomic RNA
aactcttataaatgtggaac

SEQ ID NO: 4028 - RNA, 20 nt, Homo sapiens
  source 1..20: mol_type = genomic RNA
actcttataaatgtggaacc

SEQ ID NO: 4029 - RNA, 20 nt, Homo sapiens
  source 1..20: mol_type = genomic RNA
ctcttataaatgtggaacca

SEQ ID NO: 4030 - RNA, 20 nt, Homo sapiens
  source 1..20: mol_type = genomic RNA
tcttataaatgtggaaccaa

SEQ ID NO: 4031 - RNA, 20 nt, Homo sapiens
  source 1..20: mol_type = genomic RNA
cttataaatgtggaaccaac

SEQ ID NO: 4032 - RNA, 20 nt, Homo sapiens
  source 1..20: mol_type = genomic RNA
ttataaatgtggaaccaaca

SEQ ID NO: 4033 - RNA, 20 nt, Homo sapiens
  source 1..20: mol_type = genomic RNA
tataaatgtggaaccaacac

SEQ ID NO: 4034 - RNA, 20 nt, Homo sapiens
  source 1..20: mol_type = genomic RNA
ataaatgtggaaccaacaca

SEQ ID NO: 4035 - RNA, 20 nt, Homo sapiens
  source 1..20: mol_type = genomic RNA
taaatgtggaaccaacacaa

SEQ ID NO: 4036 - RNA, 20 nt, Homo sapiens
  source 1..20: mol_type = genomic RNA
aaatgtggaaccaacacaat

SEQ ID NO: 4037 - RNA, 20 nt, Homo sapiens
  source 1..20: mol_type = genomic RNA
aatgtggaaccaacacaatg

SEQ ID NO: 4038 - RNA, 20 nt, Homo sapiens
  source 1..20: mol_type = genomic RNA
atgtggaaccaacacaatgg

SEQ ID NO: 4039 - RNA, 20 nt, Homo sapiens
  source 1..20: mol_type = genomic RNA
tgtggaaccaacacaatgga

SEQ ID NO: 4040 - RNA, 20 nt, Homo sapiens
  source 1..20: mol_type = genomic RNA
gtggaaccaacacaatggag

SEQ ID NO: 4041 - RNA, 20 nt, Homo sapiens
  source 1..20: mol_type = genomic RNA
tggaaccaacacaatggaga

SEQ ID NO: 4042 - RNA, 20 nt, Homo sapiens
  source 1..20: mol_type = genomic RNA
ggaaccaacacaatggagag

SEQ ID NO: 4043 - RNA, 20 nt, Homo sapiens
  source 1..20: mol_type = genomic RNA
gaaccaacacaatggagagg

SEQ ID NO: 4044 - RNA, 20 nt, Homo sapiens
  source 1..20: mol_type = genomic RNA
aaccaacacaatggagaggg

SEQ ID NO: 4045 - RNA, 20 nt, Homo sapiens
  source 1..20: mol_type = genomic RNA
accaacacaatggagaggga

SEQ ID NO: 4046 - RNA, 20 nt, Homo sapiens
  source 1..20: mol_type = genomic RNA
ccaacacaatggagagggaa

SEQ ID NO: 4047 - RNA, 20 nt, Homo sapiens
  source 1..20: mol_type = genomic RNA
caacacaatggagagggaag

SEQ ID NO: 4048 - RNA, 20 nt, Homo sapiens
  source 1..20: mol_type = genomic RNA
aacacaatggagagggaaga

SEQ ID NO: 4049 - RNA, 20 nt, Homo sapiens
  source 1..20: mol_type = genomic RNA
acacaatggagagggaagag

SEQ ID NO: 4050 - RNA, 20 nt, Homo sapiens
  source 1..20: mol_type = genomic RNA
cacaatggagagggaagaga

SEQ ID NO: 4051 - RNA, 20 nt, Homo sapiens
  source 1..20: mol_type = genomic RNA
acaatggagagggaagagag

SEQ ID NO: 4052 - RNA, 20 nt, Homo sapiens
  source 1..20: mol_type = genomic RNA
caatggagagggaagagagt

SEQ ID NO: 4053 - RNA, 20 nt, Homo sapiens
  source 1..20: mol_type = genomic RNA
aatggagagggaagagagtg

SEQ ID NO: 4054 - RNA, 20 nt, Homo sapiens
  source 1..20: mol_type = genomic RNA
atggagagggaagagagtga

SEQ ID NO: 4055 - RNA, 20 nt, Homo sapiens
  source 1..20: mol_type = genomic RNA
tggagagggaagagagtgaa

SEQ ID NO: 4056 - RNA, 20 nt, Homo sapiens
  source 1..20: mol_type = genomic RNA
ggagagggaagagagtgaac

SEQ ID NO: 4057 - RNA, 20 nt, Homo sapiens
  source 1..20: mol_type = genomic RNA
gagagggaagagagtgaaca

SEQ ID NO: 4058 - RNA, 20 nt, Homo sapiens
  source 1..20: mol_type = genomic RNA
agagggaagagagtgaacag

SEQ ID NO: 4059 - RNA, 20 nt, Homo sapiens
  source 1..20: mol_type = genomic RNA
gagggaagagagtgaacaga

SEQ ID NO: 4060 - RNA, 20 nt, Homo sapiens
  source 1..20: mol_type = genomic RNA
agggaagagagtgaacagac

SEQ ID NO: 4061 - RNA, 20 nt, Homo sapiens
  source 1..20: mol_type = genomic RNA
gggaagagagtgaacagacc

SEQ ID NO: 4062 - RNA, 20 nt, Homo sapiens
  source 1..20: mol_type = genomic RNA
ggaagagagtgaacagacca

SEQ ID NO: 4063 - RNA, 20 nt, Homo sapiens
  source 1..20: mol_type = genomic RNA
gaagagagtgaacagaccaa

SEQ ID NO: 4064 - RNA, 20 nt, Homo sapiens
  source 1..20: mol_type = genomic RNA
aagagagtgaacagaccaag

SEQ ID NO: 4065 - RNA, 20 nt, Homo sapiens
  source 1..20: mol_type = genomic RNA
agagagtgaacagaccaaga

SEQ ID NO: 4066 - RNA, 20 nt, Homo sapiens
  source 1..20: mol_type = genomic RNA
gagagtgaacagaccaagaa

SEQ ID NO: 4067 - RNA, 20 nt, Homo sapiens
  source 1..20: mol_type = genomic RNA
agagtgaacagaccaagaaa

SEQ ID NO: 4068 - RNA, 20 nt, Homo sapiens
  source 1..20: mol_type = genomic RNA
gagtgaacagaccaagaaaa

SEQ ID NO: 4069 - RNA, 20 nt, Homo sapiens
  source 1..20: mol_type = genomic RNA
agtgaacagaccaagaaaag

SEQ ID NO: 4070 - RNA, 20 nt, Homo sapiens
  source 1..20: mol_type = genomic RNA
gtgaacagaccaagaaaaga

SEQ ID NO: 4071 - RNA, 20 nt, Homo sapiens
  source 1..20: mol_type = genomic RNA
tgaacagaccaagaaaagag

SEQ ID NO: 4072 - RNA, 20 nt, Homo sapiens
  source 1..20: mol_type = genomic RNA
gaacagaccaagaaaagaga

SEQ ID NO: 4073 - RNA, 20 nt, Homo sapiens
  source 1..20: mol_type = genomic RNA
aacagaccaagaaaagagaa

SEQ ID NO: 4074 - RNA, 20 nt, Homo sapiens
  source 1..20: mol_type = genomic RNA
acagaccaagaaaagagaaa

SEQ ID NO: 4075 - RNA, 20 nt, Homo sapiens
  source 1..20: mol_type = genomic RNA
cagaccaagaaaagagaaaa

SEQ ID NO: 4076 - RNA, 20 nt, Homo sapiens
  source 1..20: mol_type = genomic RNA
agaccaagaaaagagaaaaa

SEQ ID NO: 4077 - RNA, 20 nt, Homo sapiens
  source 1..20: mol_type = genomic RNA
gaccaagaaaagagaaaaaa

SEQ ID NO: 4078 - RNA, 20 nt, Homo sapiens
  source 1..20: mol_type = genomic RNA
accaagaaaagagaaaaaat

SEQ ID NO: 4079 - RNA, 20 nt, Homo sapiens
  source 1..20: mol_type = genomic RNA
ccaagaaaagagaaaaaatc

SEQ ID NO: 4080 - RNA, 20 nt, Homo sapiens
  source 1..20: mol_type = genomic RNA
caagaaaagagaaaaaatcc

SEQ ID NO: 4081 - RNA, 20 nt, Homo sapiens
  source 1..20: mol_type = genomic RNA
aagaaaagagaaaaaatcca

SEQ ID NO: 4082 - RNA, 20 nt, Homo sapiens
  source 1..20: mol_type = genomic RNA
agaaaagagaaaaaatccat

SEQ ID NO: 4083 - RNA, 20 nt, Homo sapiens
  source 1..20: mol_type = genomic RNA
gaaaagagaaaaaatccata

SEQ ID NO: 4084 - RNA, 20 nt, Homo sapiens
  source 1..20: mol_type = genomic RNA
aaaagagaaaaaatccatat

SEQ ID NO: 4085 - RNA, 20 nt, Homo sapiens
  source 1..20: mol_type = genomic RNA
aaagagaaaaaatccatata

SEQ ID NO: 4086 - RNA, 20 nt, Homo sapiens
  source 1..20: mol_type = genomic RNA
aagagaaaaaatccatatac

SEQ ID NO: 4087 - RNA, 20 nt, Homo sapiens
  source 1..20: mol_type = genomic RNA
agagaaaaaatccatatacc

SEQ ID NO: 4088 - RNA, 20 nt, Homo sapiens
  source 1..20: mol_type = genomic RNA
gagaaaaaatccatatacct

SEQ ID NO: 4089 - RNA, 20 nt, Homo sapiens
  source 1..20: mol_type = genomic RNA
agaaaaaatccatatacctg

SEQ ID NO: 4090 - RNA, 20 nt, Homo sapiens
  source 1..20: mol_type = genomic RNA
gaaaaaatccatatacctga

SEQ ID NO: 4091 - RNA, 20 nt, Homo sapiens
  source 1..20: mol_type = genomic RNA
aaaaaatccatatacctgaa

SEQ ID NO: 4092 - RNA, 20 nt, Homo sapiens
  source 1..20: mol_type = genomic RNA
aaaaatccatatacctgaaa

SEQ ID NO: 4093 - RNA, 20 nt, Homo sapiens
  source 1..20: mol_type = genomic RNA
aaaatccatatacctgaaag

SEQ ID NO: 4094 - RNA, 20 nt, Homo sapiens
  source 1..20: mol_type = genomic RNA
aaatccatatacctgaaaga

SEQ ID NO: 4095 - RNA, 20 nt, Homo sapiens
  source 1..20: mol_type = genomic RNA
aatccatatacctgaaagat

SEQ ID NO: 4096 - RNA, 20 nt, Homo sapiens
  source 1..20: mol_type = genomic RNA
atccatatacctgaaagatc

SEQ ID NO: 4097 - RNA, 20 nt, Homo sapiens
  source 1..20: mol_type = genomic RNA
tccatatacctgaaagatct

SEQ ID NO: 4098 - RNA, 20 nt, Homo sapiens
  source 1..20: mol_type = genomic RNA
ccatatacctgaaagatctg

SEQ ID NO: 4099 - RNA, 20 nt, Homo sapiens
  source 1..20: mol_type = genomic RNA
catatacctgaaagatctga

SEQ ID NO: 4100 - RNA, 20 nt, Homo sapiens
  source 1..20: mol_type = genomic RNA
atatacctgaaagatctgat

SEQ ID NO: 4101 - RNA, 20 nt, Homo sapiens
  source 1..20: mol_type = genomic RNA
tatacctgaaagatctgatg

SEQ ID NO: 4102 - RNA, 20 nt, Homo sapiens
  source 1..20: mol_type = genomic RNA
atacctgaaagatctgatga

SEQ ID NO: 4103 - RNA, 20 nt, Homo sapiens
  source 1..20: mol_type = genomic RNA
tacctgaaagatctgatgaa

SEQ ID NO: 4104 - RNA, 20 nt, Homo sapiens
  source 1..20: mol_type = genomic RNA
acctgaaagatctgatgaag

SEQ ID NO: 4105 - RNA, 20 nt, Homo sapiens
  source 1..20: mol_type = genomic RNA
cctgaaagatctgatgaagc

SEQ ID NO: 4106 - RNA, 20 nt, Homo sapiens
  source 1..20: mol_type = genomic RNA
ctgaaagatctgatgaagcc

SEQ ID NO: 4107 - RNA, 20 nt, Homo sapiens
  source 1..20: mol_type = genomic RNA
tgaaagatctgatgaagccc

SEQ ID NO: 4108 - RNA, 20 nt, Homo sapiens
  source 1..20: mol_type = genomic RNA
gaaagatctgatgaagccca

SEQ ID NO: 4109 - RNA, 20 nt, Homo sapiens
  source 1..20: mol_type = genomic RNA
aaagatctgatgaagcccag

SEQ ID NO: 4110 - RNA, 20 nt, Homo sapiens
  source 1..20: mol_type = genomic RNA
aagatctgatgaagcccagc

SEQ ID NO: 4111 - RNA, 20 nt, Homo sapiens
  source 1..20: mol_type = genomic RNA
agatctgatgaagcccagcg

SEQ ID NO: 4112 - RNA, 20 nt, Homo sapiens
  source 1..20: mol_type = genomic RNA
gatctgatgaagcccagcgt

SEQ ID NO: 4113 - RNA, 20 nt, Homo sapiens
  source 1..20: mol_type = genomic RNA
atctgatgaagcccagcgtg

SEQ ID NO: 4114 - RNA, 20 nt, Homo sapiens
  source 1..20: mol_type = genomic RNA
tctgatgaagcccagcgtgt

SEQ ID NO: 4115 - RNA, 20 nt, Homo sapiens
  source 1..20: mol_type = genomic RNA
ctgatgaagcccagcgtgtt

SEQ ID NO: 4116 - RNA, 20 nt, Homo sapiens
  source 1..20: mol_type = genomic RNA
tgatgaagcccagcgtgttt

SEQ ID NO: 4117 - RNA, 20 nt, Homo sapiens
  source 1..20: mol_type = genomic RNA
gatgaagcccagcgtgtttt

SEQ ID NO: 4118 - RNA, 20 nt, Homo sapiens
  source 1..20: mol_type = genomic RNA
atgaagcccagcgtgttttt

SEQ ID NO: 4119 - RNA, 20 nt, Homo sapiens
  source 1..20: mol_type = genomic RNA
tgaagcccagcgtgttttta

SEQ ID NO: 4120 - RNA, 20 nt, Homo sapiens
  source 1..20: mol_type = genomic RNA
gaagcccagcgtgtttttaa

SEQ ID NO: 4121 - RNA, 20 nt, Homo sapiens
  source 1..20: mol_type = genomic RNA
aagcccagcgtgtttttaaa

SEQ ID NO: 4122 - RNA, 20 nt, Homo sapiens
  source 1..20: mol_type = genomic RNA
agcccagcgtgtttttaaaa

SEQ ID NO: 4123 - RNA, 20 nt, Homo sapiens
  source 1..20: mol_type = genomic RNA
gcccagcgtgtttttaaaag

SEQ ID NO: 4124 - RNA, 20 nt, Homo sapiens
  source 1..20: mol_type = genomic RNA
cccagcgtgtttttaaaagt

SEQ ID NO: 4125 - RNA, 20 nt, Homo sapiens
  source 1..20: mol_type = genomic RNA
ccagcgtgtttttaaaagtt

SEQ ID NO: 4126 - RNA, 20 nt, Homo sapiens
  source 1..20: mol_type = genomic RNA
cagcgtgtttttaaaagttc

SEQ ID NO: 4127 - RNA, 20 nt, Homo sapiens
  source 1..20: mol_type = genomic RNA
agcgtgtttttaaaagttcg

SEQ ID NO: 4128 - RNA, 20 nt, Homo sapiens
  source 1..20: mol_type = genomic RNA
gcgtgtttttaaaagttcga

SEQ ID NO: 4129 - RNA, 20 nt, Homo sapiens
  source 1..20: mol_type = genomic RNA
cgtgtttttaaaagttcgaa

SEQ ID NO: 4130 - RNA, 20 nt, Homo sapiens
  source 1..20: mol_type = genomic RNA
gtgtttttaaaagttcgaag

SEQ ID NO: 4131 - RNA, 20 nt, Homo sapiens
  source 1..20: mol_type = genomic RNA
tgtttttaaaagttcgaaga

SEQ ID NO: 4132 - RNA, 20 nt, Homo sapiens
  source 1..20: mol_type = genomic RNA
gtttttaaaagttcgaagac

SEQ ID NO: 4133 - RNA, 20 nt, Homo sapiens
  source 1..20: mol_type = genomic RNA
tttttaaaagttcgaagaca

SEQ ID NO: 4134 - RNA, 20 nt, Homo sapiens
  source 1..20: mol_type = genomic RNA
ttttaaaagttcgaagacat

SEQ ID NO: 4135 - RNA, 20 nt, Homo sapiens
  source 1..20: mol_type = genomic RNA
tttaaaagttcgaagacatc

SEQ ID NO: 4136 - RNA, 20 nt, Homo sapiens
  source 1..20: mol_type = genomic RNA
ttaaaagttcgaagacatct

SEQ ID NO: 4137 - RNA, 20 nt, Homo sapiens
  source 1..20: mol_type = genomic RNA
taaaagttcgaagacatctt

SEQ ID NO: 4138 - RNA, 20 nt, Homo sapiens
  source 1..20: mol_type = genomic RNA
aaaagttcgaagacatcttc

SEQ ID NO: 4139 - RNA, 20 nt, Homo sapiens
  source 1..20: mol_type = genomic RNA
aaagttcgaagacatcttca

SEQ ID NO: 4140 - RNA, 20 nt, Homo sapiens
  source 1..20: mol_type = genomic RNA
aagttcgaagacatcttcat

SEQ ID NO: 4141 - RNA, 20 nt, Homo sapiens
  source 1..20: mol_type = genomic RNA
agttcgaagacatcttcatg

SEQ ID NO: 4142 - RNA, 20 nt, Homo sapiens
  source 1..20: mol_type = genomic RNA
gttcgaagacatcttcatgc

SEQ ID NO: 4143 - RNA, 20 nt, Homo sapiens
  source 1..20: mol_type = genomic RNA
ttcgaagacatcttcatgcg

SEQ ID NO: 4144 - RNA, 20 nt, Homo sapiens
  source 1..20: mol_type = genomic RNA
tcgaagacatcttcatgcga

SEQ ID NO: 4145 - RNA, 20 nt, Homo sapiens
  source 1..20: mol_type = genomic RNA
cgaagacatcttcatgcgac

SEQ ID NO: 4146 - RNA, 20 nt, Homo sapiens
  source 1..20: mol_type = genomic RNA
gaagacatcttcatgcgaca

SEQ ID NO: 4147 - RNA, 20 nt, Homo sapiens
  source 1..20: mol_type = genomic RNA
aagacatcttcatgcgacaa

SEQ ID NO: 4148 - RNA, 20 nt, Homo sapiens
  source 1..20: mol_type = genomic RNA
agacatcttcatgcgacaaa

SEQ ID NO: 4149 - RNA, 20 nt, Homo sapiens
  source 1..20: mol_type = genomic RNA
gacatcttcatgcgacaaaa

SEQ ID NO: 4150 - RNA, 20 nt, Homo sapiens
  source 1..20: mol_type = genomic RNA
acatcttcatgcgacaaaag

SEQ ID NO: 4151 - RNA, 20 nt, Homo sapiens
  source 1..20: mol_type = genomic RNA
catcttcatgcgacaaaagt

SEQ ID NO: 4152 - RNA, 20 nt, Homo sapiens
  source 1..20: mol_type = genomic RNA
atcttcatgcgacaaaagtg

SEQ ID NO: 4153 - RNA, 20 nt, Homo sapiens
  source 1..20: mol_type = genomic RNA
tcttcatgcgacaaaagtga

SEQ ID NO: 4154 - RNA, 20 nt, Homo sapiens
  source 1..20: mol_type = genomic RNA
cttcatgcgacaaaagtgat

SEQ ID NO: 4155 - RNA, 20 nt, Homo sapiens
  source 1..20: mol_type = genomic RNA
ttcatgcgacaaaagtgata

SEQ ID NO: 4156 - RNA, 20 nt, Homo sapiens
  source 1..20: mol_type = genomic RNA
tcatgcgacaaaagtgatac

SEQ ID NO: 4157 - RNA, 20 nt, Homo sapiens
  source 1..20: mol_type = genomic RNA
catgcgacaaaagtgataca

SEQ ID NO: 4158 - RNA, 20 nt, Homo sapiens
  source 1..20: mol_type = genomic RNA
atgcgacaaaagtgatacat

SEQ ID NO: 4159 - RNA, 20 nt, Homo sapiens
  source 1..20: mol_type = genomic RNA
tgcgacaaaagtgatacatg

SEQ ID NO: 4160 - RNA, 20 nt, Homo sapiens
  source 1..20: mol_type = genomic RNA
gcgacaaaagtgatacatgt

SEQ ID NO: 4161 - RNA, 20 nt, Homo sapiens
  source 1..20: mol_type = genomic RNA
cgacaaaagtgatacatgtt

SEQ ID NO: 4162 - RNA, 20 nt, Homo sapiens
  source 1..20: mol_type = genomic RNA
gacaaaagtgatacatgttt

SEQ ID NO: 4163 - RNA, 20 nt, Homo sapiens
  source 1..20: mol_type = genomic RNA
acaaaagtgatacatgtttt

SEQ ID NO: 4164 - RNA, 20 nt, Homo sapiens
  source 1..20: mol_type = genomic RNA
caaaagtgatacatgttttt

SEQ ID NO: 4165 - RNA, 20 nt, Homo sapiens
  source 1..20: mol_type = genomic RNA
aaaagtgatacatgttttta

SEQ ID NO: 4166 - RNA, 20 nt, Homo sapiens
  source 1..20: mol_type = genomic RNA
aaagtgatacatgtttttaa

SEQ ID NO: 4167 - RNA, 20 nt, Homo sapiens
  source 1..20: mol_type = genomic RNA
aagtgatacatgtttttaat

SEQ ID NO: 4168 - RNA, 20 nt, Homo sapiens
  source 1..20: mol_type = genomic RNA
agtgatacatgtttttaatt

SEQ ID NO: 4169 - RNA, 20 nt, Homo sapiens
  source 1..20: mol_type = genomic RNA
gtgatacatgtttttaatta

SEQ ID NO: 4170 - RNA, 20 nt, Homo sapiens
  source 1..20: mol_type = genomic RNA
tgatacatgtttttaattaa

SEQ ID NO: 4171 - RNA, 20 nt, Homo sapiens
  source 1..20: mol_type = genomic RNA
gatacatgtttttaattaaa

SEQ ID NO: 4172 - RNA, 20 nt, Homo sapiens
  source 1..20: mol_type = genomic RNA
atacatgtttttaattaaag

SEQ ID NO: 4173 - RNA, 20 nt, Homo sapiens
  source 1..20: mol_type = genomic RNA
tacatgtttttaattaaaga

SEQ ID NO: 4174 - RNA, 20 nt, Homo sapiens
  source 1..20: mol_type = genomic RNA
acatgtttttaattaaagag

SEQ ID NO: 4175 - RNA, 20 nt, Homo sapiens
  source 1..20: mol_type = genomic RNA
catgtttttaattaaagagt

SEQ ID NO: 4176 - RNA, 20 nt, Homo sapiens
  source 1..20: mol_type = genomic RNA
atgtttttaattaaagagta

SEQ ID NO: 4177 - RNA, 20 nt, Homo sapiens
  source 1..20: mol_type = genomic RNA
tgtttttaattaaagagtaa

SEQ ID NO: 4178 - RNA, 20 nt, Homo sapiens
  source 1..20: mol_type = genomic RNA
gtttttaattaaagagtaaa

SEQ ID NO: 4179 - RNA, 20 nt, Homo sapiens
  source 1..20: mol_type = genomic RNA
tttttaattaaagagtaaag

SEQ ID NO: 4180 - RNA, 20 nt, Homo sapiens
  source 1..20: mol_type = genomic RNA
ttttaattaaagagtaaagc

SEQ ID NO: 4181 - RNA, 20 nt, Homo sapiens
  source 1..20: mol_type = genomic RNA
tttaattaaagagtaaagcc

SEQ ID NO: 4182 - RNA, 20 nt, Homo sapiens
  source 1..20: mol_type = genomic RNA
ttaattaaagagtaaagccc

SEQ ID NO: 4183 - RNA, 20 nt, Homo sapiens
  source 1..20: mol_type = genomic RNA
taattaaagagtaaagccca

SEQ ID NO: 4184 - RNA, 20 nt, Homo sapiens
  source 1..20: mol_type = genomic RNA
aattaaagagtaaagcccat

SEQ ID NO: 4185 - RNA, 20 nt, Homo sapiens
  source 1..20: mol_type = genomic RNA
attaaagagtaaagcccata

SEQ ID NO: 4186 - RNA, 20 nt, Homo sapiens
  source 1..20: mol_type = genomic RNA
ttaaagagtaaagcccatac

SEQ ID NO: 4187 - RNA, 20 nt, Homo sapiens
  source 1..20: mol_type = genomic RNA
taaagagtaaagcccataca

SEQ ID NO: 4188 - RNA, 20 nt, Homo sapiens
  source 1..20: mol_type = genomic RNA
aaagagtaaagcccatacaa

SEQ ID NO: 4189 - RNA, 20 nt, Homo sapiens
  source 1..20: mol_type = genomic RNA
aagagtaaagcccatacaag

SEQ ID NO: 4190 - RNA, 20 nt, Homo sapiens
  source 1..20: mol_type = genomic RNA
agagtaaagcccatacaagt

SEQ ID NO: 4191 - RNA, 20 nt, Homo sapiens
  source 1..20: mol_type = genomic RNA
gagtaaagcccatacaagta

SEQ ID NO: 4192 - RNA, 20 nt, Homo sapiens
  source 1..20: mol_type = genomic RNA
agtaaagcccatacaagtat

SEQ ID NO: 4193 - RNA, 20 nt, Homo sapiens
  source 1..20: mol_type = genomic RNA
gtaaagcccatacaagtatt

SEQ ID NO: 4194 - RNA, 20 nt, Homo sapiens
  source 1..20: mol_type = genomic RNA
taaagcccatacaagtattc

SEQ ID NO: 4195 - RNA, 20 nt, Homo sapiens
  source 1..20: mol_type = genomic RNA
aaagcccatacaagtattca

SEQ ID NO: 4196 - RNA, 20 nt, Homo sapiens
  source 1..20: mol_type = genomic RNA
aagcccatacaagtattcat

SEQ ID NO: 4197 - RNA, 20 nt, Homo sapiens
  source 1..20: mol_type = genomic RNA
agcccatacaagtattcatt

SEQ ID NO: 4198 - RNA, 20 nt, Homo sapiens
  source 1..20: mol_type = genomic RNA
gcccatacaagtattcattt

SEQ ID NO: 4199 - RNA, 20 nt, Homo sapiens
  source 1..20: mol_type = genomic RNA
cccatacaagtattcatttt

SEQ ID NO: 4200 - RNA, 20 nt, Homo sapiens
  source 1..20: mol_type = genomic RNA
ccatacaagtattcattttt

SEQ ID NO: 4201 - RNA, 20 nt, Homo sapiens
  source 1..20: mol_type = genomic RNA
catacaagtattcatttttt

SEQ ID NO: 4202 - RNA, 20 nt, Homo sapiens
  source 1..20: mol_type = genomic RNA
atacaagtattcattttttc

SEQ ID NO: 4203 - RNA, 20 nt, Homo sapiens
  source 1..20: mol_type = genomic RNA
tacaagtattcattttttct

SEQ ID NO: 4204 - RNA, 20 nt, Homo sapiens
  source 1..20: mol_type = genomic RNA
acaagtattcattttttcta

SEQ ID NO: 4205 - RNA, 20 nt, Homo sapiens
  source 1..20: mol_type = genomic RNA
caagtattcattttttctac

SEQ ID NO: 4206 - RNA, 20 nt, Homo sapiens
  source 1..20: mol_type = genomic RNA
aagtattcattttttctacc

SEQ ID NO: 4207 - RNA, 20 nt, Homo sapiens
  source 1..20: mol_type = genomic RNA
agtattcattttttctaccc

SEQ ID NO: 4208 - RNA, 20 nt, Homo sapiens
  source 1..20: mol_type = genomic RNA
gtattcattttttctaccct

SEQ ID NO: 4209 - RNA, 20 nt, Homo sapiens
  source 1..20: mol_type = genomic RNA
tattcattttttctaccctt

SEQ ID NO: 4210 - RNA, 20 nt, Homo sapiens
  source 1..20: mol_type = genomic RNA
attcattttttctacccttt

SEQ ID NO: 4211 - RNA, 20 nt, Homo sapiens
  source 1..20: mol_type = genomic RNA
ttcattttttctaccctttc

SEQ ID NO: 4212 - RNA, 20 nt, Homo sapiens
  source 1..20: mol_type = genomic RNA
tcattttttctaccctttcc

SEQ ID NO: 4213 - RNA, 20 nt, Homo sapiens
  source 1..20: mol_type = genomic RNA
cattttttctaccctttcct

SEQ ID NO: 4214 - RNA, 20 nt, Homo sapiens
  source 1..20: mol_type = genomic RNA
attttttctaccctttcctt

SEQ ID NO: 4215 - RNA, 20 nt, Homo sapiens
  source 1..20: mol_type = genomic RNA
ttttttctaccctttccttt

SEQ ID NO: 4216 - RNA, 20 nt, Homo sapiens
  source 1..20: mol_type = genomic RNA
tttttctaccctttcctttg

SEQ ID NO: 4217 - RNA, 20 nt, Homo sapiens
  source 1..20: mol_type = genomic RNA
ttttctaccctttcctttgt

SEQ ID NO: 4218 - RNA, 20 nt, Homo sapiens
  source 1..20: mol_type = genomic RNA
tttctaccctttcctttgta

SEQ ID NO: 4219 - RNA, 20 nt, Homo sapiens
  source 1..20: mol_type = genomic RNA
ttctaccctttcctttgtaa

SEQ ID NO: 4220 - RNA, 20 nt, Homo sapiens
  source 1..20: mol_type = genomic RNA
tctaccctttcctttgtaag

SEQ ID NO: 4221 - RNA, 20 nt, Homo sapiens
  source 1..20: mol_type = genomic RNA
ctaccctttcctttgtaagt

SEQ ID NO: 4222 - RNA, 20 nt, Homo sapiens
  source 1..20: mol_type = genomic RNA
taccctttcctttgtaagtt

SEQ ID NO: 4223 - RNA, 20 nt, Homo sapiens
  source 1..20: mol_type = genomic RNA
accctttcctttgtaagttc

SEQ ID NO: 4224 - RNA, 20 nt, Homo sapiens
  source 1..20: mol_type = genomic RNA
ccctttcctttgtaagttcc

SEQ ID NO: 4225 - RNA, 20 nt, Homo sapiens
  source 1..20: mol_type = genomic RNA
cctttcctttgtaagttcct

SEQ ID NO: 4226 - RNA, 20 nt, Homo sapiens
  source 1..20: mol_type = genomic RNA
ctttcctttgtaagttcctg

SEQ ID NO: 4227 - RNA, 20 nt, Homo sapiens
  source 1..20: mol_type = genomic RNA
tttcctttgtaagttcctgg

SEQ ID NO: 4228 - RNA, 20 nt, Homo sapiens
  source 1..20: mol_type = genomic RNA
ttcctttgtaagttcctggg

SEQ ID NO: 4229 - RNA, 20 nt, Homo sapiens
  source 1..20: mol_type = genomic RNA
tcctttgtaagttcctgggc

SEQ ID NO: 4230 - RNA, 20 nt, Homo sapiens
  source 1..20: mol_type = genomic RNA
cctttgtaagttcctgggca

SEQ ID NO: 4231 - RNA, 20 nt, Homo sapiens
  source 1..20: mol_type = genomic RNA
ctttgtaagttcctgggcaa

SEQ ID NO: 4232 - RNA, 20 nt, Homo sapiens
  source 1..20: mol_type = genomic RNA
tttgtaagttcctgggcaac

SEQ ID NO: 4233 - RNA, 20 nt, Homo sapiens
  source 1..20: mol_type = genomic RNA
ttgtaagttcctgggcaacc

SEQ ID NO: 4234 - RNA, 20 nt, Homo sapiens
  source 1..20: mol_type = genomic RNA
tgtaagttcctgggcaacct

SEQ ID NO: 4235 - RNA, 20 nt, Homo sapiens
  source 1..20: mol_type = genomic RNA
gtaagttcctgggcaacctt

SEQ ID NO: 4236 - RNA, 20 nt, Homo sapiens
  source 1..20: mol_type = genomic RNA
taagttcctgggcaaccttt

SEQ ID NO: 4237 - RNA, 20 nt, Homo sapiens
  source 1..20: mol_type = genomic RNA
aagttcctgggcaacctttt

SEQ ID NO: 4238 - RNA, 20 nt, Homo sapiens
  source 1..20: mol_type = genomic RNA
agttcctgggcaaccttttt

SEQ ID NO: 4239 - RNA, 20 nt, Homo sapiens
  source 1..20: mol_type = genomic RNA
gttcctgggcaacctttttg

SEQ ID NO: 4240 - RNA, 20 nt, Homo sapiens
  source 1..20: mol_type = genomic RNA
ttcctgggcaacctttttga

SEQ ID NO: 4241 - RNA, 20 nt, Homo sapiens
  source 1..20: mol_type = genomic RNA
tcctgggcaacctttttgat

SEQ ID NO: 4242 - RNA, 20 nt, Homo sapiens
  source 1..20: mol_type = genomic RNA
cctgggcaacctttttgatt

SEQ ID NO: 4243 - RNA, 20 nt, Homo sapiens
  source 1..20: mol_type = genomic RNA
ctgggcaacctttttgattt

SEQ ID NO: 4244 - RNA, 20 nt, Homo sapiens
  source 1..20: mol_type = genomic RNA
tgggcaacctttttgatttc

SEQ ID NO: 4245 - RNA, 20 nt, Homo sapiens
  source 1..20: mol_type = genomic RNA
gggcaacctttttgatttct

SEQ ID NO: 4246 - RNA, 20 nt, Homo sapiens
  source 1..20: mol_type = genomic RNA
ggcaacctttttgatttctt

SEQ ID NO: 4247 - RNA, 20 nt, Homo sapiens
  source 1..20: mol_type = genomic RNA
gcaacctttttgatttcttc

SEQ ID NO: 4248 - RNA, 20 nt, Homo sapiens
  source 1..20: mol_type = genomic RNA
caacctttttgatttcttcc

SEQ ID NO: 4249 - RNA, 20 nt, Homo sapiens
  source 1..20: mol_type = genomic RNA
aacctttttgatttcttcca

SEQ ID NO: 4250 - RNA, 20 nt, Homo sapiens
  source 1..20: mol_type = genomic RNA
acctttttgatttcttccag

SEQ ID NO: 4251 - RNA, 20 nt, Homo sapiens
  source 1..20: mol_type = genomic RNA
cctttttgatttcttccaga

SEQ ID NO: 4252 - RNA, 20 nt, Homo sapiens
  source 1..20: mol_type = genomic RNA
ctttttgatttcttccagaa

SEQ ID NO: 4253 - RNA, 20 nt, Homo sapiens
  source 1..20: mol_type = genomic RNA
tttttgatttcttccagaag

SEQ ID NO: 4254 - RNA, 20 nt, Homo sapiens
  source 1..20: mol_type = genomic RNA
ttttgatttcttccagaagg

SEQ ID NO: 4255 - RNA, 20 nt, Homo sapiens
  source 1..20: mol_type = genomic RNA
tttgatttcttccagaaggc

SEQ ID NO: 4256 - RNA, 20 nt, Homo sapiens
  source 1..20: mol_type = genomic RNA
ttgatttcttccagaaggca

SEQ ID NO: 4257 - RNA, 20 nt, Homo sapiens
  source 1..20: mol_type = genomic RNA
tgatttcttccagaaggcaa

SEQ ID NO: 4258 - RNA, 20 nt, Homo sapiens
  source 1..20: mol_type = genomic RNA
gatttcttccagaaggcaaa

SEQ ID NO: 4259 - RNA, 20 nt, Homo sapiens
  source 1..20: mol_type = genomic RNA
atttcttccagaaggcaaaa

SEQ ID NO: 4260 - RNA, 20 nt, Homo sapiens
  source 1..20: mol_type = genomic RNA
tttcttccagaaggcaaaaa

SEQ ID NO: 4261 - RNA, 20 nt, Homo sapiens
  source 1..20: mol_type = genomic RNA
ttcttccagaaggcaaaaag

SEQ ID NO: 4262 - RNA, 20 nt, Homo sapiens
  source 1..20: mol_type = genomic RNA
tcttccagaaggcaaaaaga

SEQ ID NO: 4263 - RNA, 20 nt, Homo sapiens
  source 1..20: mol_type = genomic RNA
cttccagaaggcaaaaagac

SEQ ID NO: 4264 - RNA, 20 nt, Homo sapiens
  source 1..20: mol_type = genomic RNA
ttccagaaggcaaaaagaca

SEQ ID NO: 4265 - RNA, 20 nt, Homo sapiens
  source 1..20: mol_type = genomic RNA
tccagaaggcaaaaagacat

SEQ ID NO: 4266 - RNA, 20 nt, Homo sapiens
  source 1..20: mol_type = genomic RNA
ccagaaggcaaaaagacatt

SEQ ID NO: 4267 - RNA, 20 nt, Homo sapiens
  source 1..20: mol_type = genomic RNA
cagaaggcaaaaagacatta

SEQ ID NO: 4268 - RNA, 20 nt, Homo sapiens
  source 1..20: mol_type = genomic RNA
agaaggcaaaaagacattac

SEQ ID NO: 4269 - RNA, 20 nt, Homo sapiens
  source 1..20: mol_type = genomic RNA
gaaggcaaaaagacattacc

SEQ ID NO: 4270 - RNA, 20 nt, Homo sapiens
  source 1..20: mol_type = genomic RNA
aaggcaaaaagacattacca

SEQ ID NO: 4271 - RNA, 20 nt, Homo sapiens
  source 1..20: mol_type = genomic RNA
aggcaaaaagacattaccat

SEQ ID NO: 4272 - RNA, 20 nt, Homo sapiens
  source 1..20: mol_type = genomic RNA
ggcaaaaagacattaccatg

SEQ ID NO: 4273 - RNA, 20 nt, Homo sapiens
  source 1..20: mol_type = genomic RNA
gcaaaaagacattaccatga

SEQ ID NO: 4274 - RNA, 20 nt, Homo sapiens
  source 1..20: mol_type = genomic RNA
caaaaagacattaccatgag

SEQ ID NO: 4275 - RNA, 20 nt, Homo sapiens
  source 1..20: mol_type = genomic RNA
aaaaagacattaccatgagt

SEQ ID NO: 4276 - RNA, 20 nt, Homo sapiens
  source 1..20: mol_type = genomic RNA
aaaagacattaccatgagta

SEQ ID NO: 4277 - RNA, 20 nt, Homo sapiens
  source 1..20: mol_type = genomic RNA
aaagacattaccatgagtaa

SEQ ID NO: 4278 - RNA, 20 nt, Homo sapiens
  source 1..20: mol_type = genomic RNA
aagacattaccatgagtaat

SEQ ID NO: 4279 - RNA, 20 nt, Homo sapiens
  source 1..20: mol_type = genomic RNA
agacattaccatgagtaata

SEQ ID NO: 4280 - RNA, 20 nt, Homo sapiens
  source 1..20: mol_type = genomic RNA
gacattaccatgagtaataa

SEQ ID NO: 4281 - RNA, 20 nt, Homo sapiens
  source 1..20: mol_type = genomic RNA
acattaccatgagtaataag

SEQ ID NO: 4282 - RNA, 20 nt, Homo sapiens
  source 1..20: mol_type = genomic RNA
cattaccatgagtaataagg

SEQ ID NO: 4283 - RNA, 20 nt, Homo sapiens
  source 1..20: mol_type = genomic RNA
attaccatgagtaataaggg

SEQ ID NO: 4284 - RNA, 20 nt, Homo sapiens
  source 1..20: mol_type = genomic RNA
ttaccatgagtaataagggg

SEQ ID NO: 4285 - RNA, 20 nt, Homo sapiens
  source 1..20: mol_type = genomic RNA
taccatgagtaataaggggg

SEQ ID NO: 4286 - RNA, 20 nt, Homo sapiens
  source 1..20: mol_type = genomic RNA
accatgagtaataagggggc

SEQ ID NO: 4287 - RNA, 20 nt, Homo sapiens
  source 1..20: mol_type = genomic RNA
ccatgagtaataagggggct

SEQ ID NO: 4288 - RNA, 20 nt, Homo sapiens
  source 1..20: mol_type = genomic RNA
catgagtaataagggggctc

SEQ ID NO: 4289 - RNA, 20 nt, Homo sapiens
  source 1..20: mol_type = genomic RNA
atgagtaataagggggctcc

SEQ ID NO: 4290 - RNA, 20 nt, Homo sapiens
  source 1..20: mol_type = genomic RNA
tgagtaataagggggctcca

SEQ ID NO: 4291 - RNA, 20 nt, Homo sapiens
  source 1..20: mol_type = genomic RNA
gagtaataagggggctccag

SEQ ID NO: 4292 - RNA, 20 nt, Homo sapiens
  source 1..20: mol_type = genomic RNA
agtaataagggggctccagg

SEQ ID NO: 4293 - RNA, 20 nt, Homo sapiens
  source 1..20: mol_type = genomic RNA
gtaataagggggctccagga

SEQ ID NO: 4294 - RNA, 20 nt, Homo sapiens
  source 1..20: mol_type = genomic RNA
taataagggggctccaggac

SEQ ID NO: 4295 - RNA, 20 nt, Homo sapiens
  source 1..20: mol_type = genomic RNA
aataagggggctccaggact

SEQ ID NO: 4296 - RNA, 20 nt, Homo sapiens
  source 1..20: mol_type = genomic RNA
ataagggggctccaggactc

SEQ ID NO: 4297 - RNA, 20 nt, Homo sapiens
  source 1..20: mol_type = genomic RNA
taagggggctccaggactcc

SEQ ID NO: 4298 - RNA, 20 nt, Homo sapiens
  source 1..20: mol_type = genomic RNA
aagggggctccaggactccc

SEQ ID NO: 4299 - RNA, 20 nt, Homo sapiens
  source 1..20: mol_type = genomic RNA
agggggctccaggactccct

SEQ ID NO: 4300 - RNA, 20 nt, Homo sapiens
  source 1..20: mol_type = genomic RNA
gggggctccaggactccctc

SEQ ID NO: 4301 - RNA, 20 nt, Homo sapiens
  source 1..20: mol_type = genomic RNA
ggggctccaggactccctct

SEQ ID NO: 4302 - RNA, 20 nt, Homo sapiens
  source 1..20: mol_type = genomic RNA
gggctccaggactccctcta

SEQ ID NO: 4303 - RNA, 20 nt, Homo sapiens
  source 1..20: mol_type = genomic RNA
ggctccaggactccctctaa

SEQ ID NO: 4304 - RNA, 20 nt, Homo sapiens
  source 1..20: mol_type = genomic RNA
gctccaggactccctctaag

SEQ ID NO: 4305 - RNA, 20 nt, Homo sapiens
  source 1..20: mol_type = genomic RNA
ctccaggactccctctaagt

SEQ ID NO: 4306 - RNA, 20 nt, Homo sapiens
  source 1..20: mol_type = genomic RNA
tccaggactccctctaagtg

SEQ ID NO: 4307 - RNA, 20 nt, Homo sapiens
  source 1..20: mol_type = genomic RNA
ccaggactccctctaagtgg

SEQ ID NO: 4308 - RNA, 20 nt, Homo sapiens
  source 1..20: mol_type = genomic RNA
caggactccctctaagtgga

SEQ ID NO: 4309 - RNA, 20 nt, Homo sapiens
  source 1..20: mol_type = genomic RNA
aggactccctctaagtggaa

SEQ ID NO: 4310 - RNA, 20 nt, Homo sapiens
  source 1..20: mol_type = genomic RNA
ggactccctctaagtggaat

SEQ ID NO: 4311 - RNA, 20 nt, Homo sapiens
  source 1..20: mol_type = genomic RNA
gactccctctaagtggaata

SEQ ID NO: 4312 - RNA, 20 nt, Homo sapiens
  source 1..20: mol_type = genomic RNA
actccctctaagtggaatag

SEQ ID NO: 4313 - RNA, 20 nt, Homo sapiens
  source 1..20: mol_type = genomic RNA
ctccctctaagtggaatagc

SEQ ID NO: 4314 - RNA, 20 nt, Homo sapiens
  source 1..20: mol_type = genomic RNA
tccctctaagtggaatagcc

SEQ ID NO: 4315 - RNA, 20 nt, Homo sapiens
  source 1..20: mol_type = genomic RNA
ccctctaagtggaatagcct

SEQ ID NO: 4316 - RNA, 20 nt, Homo sapiens
  source 1..20: mol_type = genomic RNA
cctctaagtggaatagcctc

SEQ ID NO: 4317 - RNA, 20 nt, Homo sapiens
  source 1..20: mol_type = genomic RNA
ctctaagtggaatagcctcc

SEQ ID NO: 4318 - RNA, 20 nt, Homo sapiens
  source 1..20: mol_type = genomic RNA
tctaagtggaatagcctccc

SEQ ID NO: 4319 - RNA, 20 nt, Homo sapiens
  source 1..20: mol_type = genomic RNA
ctaagtggaatagcctccct

SEQ ID NO: 4320 - RNA, 20 nt, Homo sapiens
  source 1..20: mol_type = genomic RNA
taagtggaatagcctccctg

SEQ ID NO: 4321 - RNA, 20 nt, Homo sapiens
  source 1..20: mol_type = genomic RNA
aagtggaatagcctccctgt

SEQ ID NO: 4322 - RNA, 20 nt, Homo sapiens
  source 1..20: mol_type = genomic RNA
agtggaatagcctccctgta

SEQ ID NO: 4323 - RNA, 20 nt, Homo sapiens
  source 1..20: mol_type = genomic RNA
gtggaatagcctccctgtaa

SEQ ID NO: 4324 - RNA, 20 nt, Homo sapiens
  source 1..20: mol_type = genomic RNA
tggaatagcctccctgtaac

SEQ ID NO: 4325 - RNA, 20 nt, Homo sapiens
  source 1..20: mol_type = genomic RNA
ggaatagcctccctgtaact

SEQ ID NO: 4326 - RNA, 20 nt, Homo sapiens
  source 1..20: mol_type = genomic RNA
gaatagcctccctgtaactc

SEQ ID NO: 4327 - RNA, 20 nt, Homo sapiens
  source 1..20: mol_type = genomic RNA
aatagcctccctgtaactcc

SEQ ID NO: 4328 - RNA, 20 nt, Homo sapiens
  source 1..20: mol_type = genomic RNA
atagcctccctgtaactcca

SEQ ID NO: 4329 - RNA, 20 nt, Homo sapiens
  source 1..20: mol_type = genomic RNA
tagcctccctgtaactccag

SEQ ID NO: 4330 - RNA, 20 nt, Homo sapiens
  source 1..20: mol_type = genomic RNA
agcctccctgtaactccagc

SEQ ID NO: 4331 - RNA, 20 nt, Homo sapiens
  source 1..20: mol_type = genomic RNA
gcctccctgtaactccagct

SEQ ID NO: 4332 - RNA, 20 nt, Homo sapiens
  source 1..20: mol_type = genomic RNA
cctccctgtaactccagctc

SEQ ID NO: 4333 - RNA, 20 nt, Homo sapiens
  source 1..20: mol_type = genomic RNA
ctccctgtaactccagctct

SEQ ID NO: 4334 - RNA, 20 nt, Homo sapiens
  source 1..20: mol_type = genomic RNA
tccctgtaactccagctctg

SEQ ID NO: 4335 - RNA, 20 nt, Homo sapiens
  source 1..20: mol_type = genomic RNA
ccctgtaactccagctctgc

SEQ ID NO: 4336 - RNA, 20 nt, Homo sapiens
  source 1..20: mol_type = genomic RNA
cctgtaactccagctctgct

SEQ ID NO: 4337 - RNA, 20 nt, Homo sapiens
  source 1..20: mol_type = genomic RNA
ctgtaactccagctctgctc

SEQ ID NO: 4338 - RNA, 20 nt, Homo sapiens
  source 1..20: mol_type = genomic RNA
tgtaactccagctctgctcc

SEQ ID NO: 4339 - RNA, 20 nt, Homo sapiens
  source 1..20: mol_type = genomic RNA
gtaactccagctctgctccg

SEQ ID NO: 4340 - RNA, 20 nt, Homo sapiens
  source 1..20: mol_type = genomic RNA
taactccagctctgctccgt

SEQ ID NO: 4341 - RNA, 20 nt, Homo sapiens
  source 1..20: mol_type = genomic RNA
aactccagctctgctccgta

SEQ ID NO: 4342 - RNA, 20 nt, Homo sapiens
  source 1..20: mol_type = genomic RNA
actccagctctgctccgtat

SEQ ID NO: 4343 - RNA, 20 nt, Homo sapiens
  source 1..20: mol_type = genomic RNA
ctccagctctgctccgtatg

SEQ ID NO: 4344 - RNA, 20 nt, Homo sapiens
  source 1..20: mol_type = genomic RNA
tccagctctgctccgtatgc

SEQ ID NO: 4345 - RNA, 20 nt, Homo sapiens
  source 1..20: mol_type = genomic RNA
ccagctctgctccgtatgcc

SEQ ID NO: 4346 - RNA, 20 nt, Homo sapiens
  source 1..20: mol_type = genomic RNA
cagctctgctccgtatgcca

SEQ ID NO: 4347 - RNA, 20 nt, Homo sapiens
  source 1..20: mol_type = genomic RNA
agctctgctccgtatgccaa

SEQ ID NO: 4348 - RNA, 20 nt, Homo sapiens
  source 1..20: mol_type = genomic RNA
gctctgctccgtatgccaag

SEQ ID NO: 4349 - RNA, 20 nt, Homo sapiens
  source 1..20: mol_type = genomic RNA
ctctgctccgtatgccaaga

SEQ ID NO: 4350 - RNA, 20 nt, Homo sapiens
  source 1..20: mol_type = genomic RNA
tctgctccgtatgccaagag

SEQ ID NO: 4351 - RNA, 20 nt, Homo sapiens
  source 1..20: mol_type = genomic RNA
ctgctccgtatgccaagagg

SEQ ID NO: 4352 - RNA, 20 nt, Homo sapiens
  source 1..20: mol_type = genomic RNA
tgctccgtatgccaagagga

SEQ ID NO: 4353 - RNA, 20 nt, Homo sapiens
  source 1..20: mol_type = genomic RNA
gctccgtatgccaagaggag

SEQ ID NO: 4354 - RNA, 20 nt, Homo sapiens
  source 1..20: mol_type = genomic RNA
ctccgtatgccaagaggaga

SEQ ID NO: 4355 - RNA, 20 nt, Homo sapiens
  source 1..20: mol_type = genomic RNA
tccgtatgccaagaggagac

SEQ ID NO: 4356 - RNA, 20 nt, Homo sapiens
  source 1..20: mol_type = genomic RNA
ccgtatgccaagaggagact

SEQ ID NO: 4357 - RNA, 20 nt, Homo sapiens
  source 1..20: mol_type = genomic RNA
cgtatgccaagaggagactt

SEQ ID NO: 4358 - RNA, 20 nt, Homo sapiens
  source 1..20: mol_type = genomic RNA
gtatgccaagaggagacttt

SEQ ID NO: 4359 - RNA, 20 nt, Homo sapiens
  source 1..20: mol_type = genomic RNA
tatgccaagaggagacttta

SEQ ID NO: 4360 - RNA, 20 nt, Homo sapiens
  source 1..20: mol_type = genomic RNA
atgccaagaggagactttaa

SEQ ID NO: 4361 - RNA, 20 nt, Homo sapiens
  source 1..20: mol_type = genomic RNA
tgccaagaggagactttaat

SEQ ID NO: 4362 - RNA, 20 nt, Homo sapiens
  source 1..20: mol_type = genomic RNA
gccaagaggagactttaatt

SEQ ID NO: 4363 - RNA, 20 nt, Homo sapiens
  source 1..20: mol_type = genomic RNA
ccaagaggagactttaattc

SEQ ID NO: 4364 - RNA, 20 nt, Homo sapiens
  source 1..20: mol_type = genomic RNA
caagaggagactttaattct

SEQ ID NO: 4365 - RNA, 20 nt, Homo sapiens
  source 1..20: mol_type = genomic RNA
aagaggagactttaattctc

SEQ ID NO: 4366 - RNA, 20 nt, Homo sapiens
  source 1..20: mol_type = genomic RNA
agaggagactttaattctct

SEQ ID NO: 4367 - RNA, 20 nt, Homo sapiens
  source 1..20: mol_type = genomic RNA
gaggagactttaattctctt

SEQ ID NO: 4368 - RNA, 20 nt, Homo sapiens
  source 1..20: mol_type = genomic RNA
aggagactttaattctctta

SEQ ID NO: 4369 - RNA, 20 nt, Homo sapiens
  source 1..20: mol_type = genomic RNA
ggagactttaattctcttac

SEQ ID NO: 4370 - RNA, 20 nt, Homo sapiens
  source 1..20: mol_type = genomic RNA
gagactttaattctcttact

SEQ ID NO: 4371 - RNA, 20 nt, Homo sapiens
  source 1..20: mol_type = genomic RNA
agactttaattctcttactg

SEQ ID NO: 4372 - RNA, 20 nt, Homo sapiens
  source 1..20: mol_type = genomic RNA
gactttaattctcttactgc

SEQ ID NO: 4373 - RNA, 20 nt, Homo sapiens
  source 1..20: mol_type = genomic RNA
actttaattctcttactgct

SEQ ID NO: 4374 - RNA, 20 nt, Homo sapiens
  source 1..20: mol_type = genomic RNA
ctttaattctcttactgctt

SEQ ID NO: 4375 - RNA, 20 nt, Homo sapiens
  source 1..20: mol_type = genomic RNA
tttaattctcttactgcttc

SEQ ID NO: 4376 - RNA, 20 nt, Homo sapiens
  source 1..20: mol_type = genomic RNA
ttaattctcttactgcttct

SEQ ID NO: 4377 - RNA, 20 nt, Homo sapiens
  source 1..20: mol_type = genomic RNA
taattctcttactgcttctt

SEQ ID NO: 4378 - RNA, 20 nt, Homo sapiens
  source 1..20: mol_type = genomic RNA
aattctcttactgcttcttt

SEQ ID NO: 4379 - RNA, 20 nt, Homo sapiens
  source 1..20: mol_type = genomic RNA
attctcttactgcttctttt

SEQ ID NO: 4380 - RNA, 20 nt, Homo sapiens
  source 1..20: mol_type = genomic RNA
ttctcttactgcttcttttc

SEQ ID NO: 4381 - RNA, 20 nt, Homo sapiens
  source 1..20: mol_type = genomic RNA
tctcttactgcttcttttca

SEQ ID NO: 4382 - RNA, 20 nt, Homo sapiens
  source 1..20: mol_type = genomic RNA
ctcttactgcttcttttcac

SEQ ID NO: 4383 - RNA, 20 nt, Homo sapiens
  source 1..20: mol_type = genomic RNA
tcttactgcttcttttcact

SEQ ID NO: 4384 - RNA, 20 nt, Homo sapiens
  source 1..20: mol_type = genomic RNA
cttactgcttcttttcactt

SEQ ID NO: 4385 - RNA, 20 nt, Homo sapiens
  source 1..20: mol_type = genomic RNA
ttactgcttcttttcacttc

SEQ ID NO: 4386 - RNA, 20 nt, Homo sapiens
  source 1..20: mol_type = genomic RNA
tactgcttcttttcacttca

SEQ ID NO: 4387 - RNA, 20 nt, Homo sapiens
  source 1..20: mol_type = genomic RNA
actgcttcttttcacttcag

SEQ ID NO: 4388 - RNA, 20 nt, Homo sapiens
  source 1..20: mol_type = genomic RNA
ctgcttcttttcacttcaga

SEQ ID NO: 4389 - RNA, 20 nt, Homo sapiens
  source 1..20: mol_type = genomic RNA
tgcttcttttcacttcagag

SEQ ID NO: 4390 - RNA, 20 nt, Homo sapiens
  source 1..20: mol_type = genomic RNA
gcttcttttcacttcagagc

SEQ ID NO: 4391 - RNA, 20 nt, Homo sapiens
  source 1..20: mol_type = genomic RNA
cttcttttcacttcagagca

SEQ ID NO: 4392 - RNA, 20 nt, Homo sapiens
  source 1..20: mol_type = genomic RNA
ttcttttcacttcagagcac

SEQ ID NO: 4393 - RNA, 20 nt, Homo sapiens
  source 1..20: mol_type = genomic RNA
tcttttcacttcagagcaca

SEQ ID NO: 4394 - RNA, 20 nt, Homo sapiens
  source 1..20: mol_type = genomic RNA
cttttcacttcagagcacac

SEQ ID NO: 4395 - RNA, 20 nt, Homo sapiens
  source 1..20: mol_type = genomic RNA
ttttcacttcagagcacact

SEQ ID NO: 4396 - RNA, 20 nt, Homo sapiens
  source 1..20: mol_type = genomic RNA
tttcacttcagagcacactt

SEQ ID NO: 4397 - RNA, 20 nt, Homo sapiens
  source 1..20: mol_type = genomic RNA
ttcacttcagagcacactta

SEQ ID NO: 4398 - RNA, 20 nt, Homo sapiens
  source 1..20: mol_type = genomic RNA
tcacttcagagcacacttat

SEQ ID NO: 4399 - RNA, 20 nt, Homo sapiens
  source 1..20: mol_type = genomic RNA
cacttcagagcacacttatg

SEQ ID NO: 4400 - RNA, 20 nt, Homo sapiens
  source 1..20: mol_type = genomic RNA
acttcagagcacacttatgg

SEQ ID NO: 4401 - RNA, 20 nt, Homo sapiens
  source 1..20: mol_type = genomic RNA
cttcagagcacacttatggg

SEQ ID NO: 4402 - RNA, 20 nt, Homo sapiens
  source 1..20: mol_type = genomic RNA
ttcagagcacacttatgggc

SEQ ID NO: 4403 - RNA, 20 nt, Homo sapiens
  source 1..20: mol_type = genomic RNA
tcagagcacacttatgggcc

SEQ ID NO: 4404 - RNA, 20 nt, Homo sapiens
  source 1..20: mol_type = genomic RNA
cagagcacacttatgggcca

SEQ ID NO: 4405 - RNA, 20 nt, Homo sapiens
  source 1..20: mol_type = genomic RNA
agagcacacttatgggccaa

SEQ ID NO: 4406 - RNA, 20 nt, Homo sapiens
  source 1..20: mol_type = genomic RNA
gagcacacttatgggccaag

SEQ ID NO: 4407 - RNA, 20 nt, Homo sapiens
  source 1..20: mol_type = genomic RNA
agcacacttatgggccaagc

SEQ ID NO: 4408 - RNA, 20 nt, Homo sapiens
  source 1..20: mol_type = genomic RNA
gcacacttatgggccaagcc

SEQ ID NO: 4409 - RNA, 20 nt, Homo sapiens
  source 1..20: mol_type = genomic RNA
cacacttatgggccaagccc

SEQ ID NO: 4410 - RNA, 20 nt, Homo sapiens
  source 1..20: mol_type = genomic RNA
acacttatgggccaagccca

SEQ ID NO: 4411 - RNA, 20 nt, Homo sapiens
  source 1..20: mol_type = genomic RNA
cacttatgggccaagcccag

SEQ ID NO: 4412 - RNA, 20 nt, Homo sapiens
  source 1..20: mol_type = genomic RNA
acttatgggccaagcccagc

SEQ ID NO: 4413 - RNA, 20 nt, Homo sapiens
  source 1..20: mol_type = genomic RNA
cttatgggccaagcccagct

SEQ ID NO: 4414 - RNA, 20 nt, Homo sapiens
  source 1..20: mol_type = genomic RNA
ttatgggccaagcccagctt

SEQ ID NO: 4415 - RNA, 20 nt, Homo sapiens
  source 1..20: mol_type = genomic RNA
tatgggccaagcccagctta

SEQ ID NO: 4416 - RNA, 20 nt, Homo sapiens
  source 1..20: mol_type = genomic RNA
atgggccaagcccagcttaa

SEQ ID NO: 4417 - RNA, 20 nt, Homo sapiens
  source 1..20: mol_type = genomic RNA
tgggccaagcccagcttaat

SEQ ID NO: 4418 - RNA, 20 nt, Homo sapiens
  source 1..20: mol_type = genomic RNA
gggccaagcccagcttaatg

SEQ ID NO: 4419 - RNA, 20 nt, Homo sapiens
  source 1..20: mol_type = genomic RNA
ggccaagcccagcttaatgg

SEQ ID NO: 4420 - RNA, 20 nt, Homo sapiens
  source 1..20: mol_type = genomic RNA
gccaagcccagcttaatggc

SEQ ID NO: 4421 - RNA, 20 nt, Homo sapiens
  source 1..20: mol_type = genomic RNA
ccaagcccagcttaatggct

SEQ ID NO: 4422 - RNA, 20 nt, Homo sapiens
  source 1..20: mol_type = genomic RNA
caagcccagcttaatggctc

SEQ ID NO: 4423 - RNA, 20 nt, Homo sapiens
  source 1..20: mol_type = genomic RNA
aagcccagcttaatggctca

SEQ ID NO: 4424 - RNA, 20 nt, Homo sapiens
  source 1..20: mol_type = genomic RNA
agcccagcttaatggctcat

SEQ ID NO: 4425 - RNA, 20 nt, Homo sapiens
  source 1..20: mol_type = genomic RNA
gcccagcttaatggctcatg

SEQ ID NO: 4426 - RNA, 20 nt, Homo sapiens
  source 1..20: mol_type = genomic RNA
cccagcttaatggctcatga

SEQ ID NO: 4427 - RNA, 20 nt, Homo sapiens
  source 1..20: mol_type = genomic RNA
ccagcttaatggctcatgac

SEQ ID NO: 4428 - RNA, 20 nt, Homo sapiens
  source 1..20: mol_type = genomic RNA
cagcttaatggctcatgacc

SEQ ID NO: 4429 - RNA, 20 nt, Homo sapiens
  source 1..20: mol_type = genomic RNA
agcttaatggctcatgacct

SEQ ID NO: 4430 - RNA, 20 nt, Homo sapiens
  source 1..20: mol_type = genomic RNA
gcttaatggctcatgacctg

SEQ ID NO: 4431 - RNA, 20 nt, Homo sapiens
  source 1..20: mol_type = genomic RNA
cttaatggctcatgacctgg

SEQ ID NO: 4432 - RNA, 20 nt, Homo sapiens
  source 1..20: mol_type = genomic RNA
ttaatggctcatgacctgga

SEQ ID NO: 4433 - RNA, 20 nt, Homo sapiens
  source 1..20: mol_type = genomic RNA
taatggctcatgacctggaa

SEQ ID NO: 4434 - RNA, 20 nt, Homo sapiens
  source 1..20: mol_type = genomic RNA
aatggctcatgacctggaaa

SEQ ID NO: 4435 - RNA, 20 nt, Homo sapiens
  source 1..20: mol_type = genomic RNA
atggctcatgacctggaaat

SEQ ID NO: 4436 - RNA, 20 nt, Homo sapiens
  source 1..20: mol_type = genomic RNA
tggctcatgacctggaaata

SEQ ID NO: 4437 - RNA, 20 nt, Homo sapiens
  source 1..20: mol_type = genomic RNA
ggctcatgacctggaaataa

SEQ ID NO: 4438 - RNA, 20 nt, Homo sapiens
  source 1..20: mol_type = genomic RNA
gctcatgacctggaaataaa

SEQ ID NO: 4439 - RNA, 20 nt, Homo sapiens
  source 1..20: mol_type = genomic RNA
ctcatgacctggaaataaaa

SEQ ID NO: 4440 - RNA, 20 nt, Homo sapiens
  source 1..20: mol_type = genomic RNA
tcatgacctggaaataaaat

SEQ ID NO: 4441 - RNA, 20 nt, Homo sapiens
  source 1..20: mol_type = genomic RNA
catgacctggaaataaaatt

SEQ ID NO: 4442 - RNA, 20 nt, Homo sapiens
  source 1..20: mol_type = genomic RNA
atgacctggaaataaaattt

SEQ ID NO: 4443 - RNA, 20 nt, Homo sapiens
  source 1..20: mol_type = genomic RNA
tgacctggaaataaaattta

SEQ ID NO: 4444 - RNA, 20 nt, Homo sapiens
  source 1..20: mol_type = genomic RNA
gacctggaaataaaatttag

SEQ ID NO: 4445 - RNA, 20 nt, Homo sapiens
  source 1..20: mol_type = genomic RNA
acctggaaataaaatttagg

SEQ ID NO: 4446 - RNA, 20 nt, Homo sapiens
  source 1..20: mol_type = genomic RNA
cctggaaataaaatttagga

SEQ ID NO: 4447 - RNA, 20 nt, Homo sapiens
  source 1..20: mol_type = genomic RNA
ctggaaataaaatttaggac

SEQ ID NO: 4448 - RNA, 20 nt, Homo sapiens
  source 1..20: mol_type = genomic RNA
tggaaataaaatttaggacc

SEQ ID NO: 4449 - RNA, 20 nt, Homo sapiens
  source 1..20: mol_type = genomic RNA
ggaaataaaatttaggacca

SEQ ID NO: 4450 - RNA, 20 nt, Homo sapiens
  source 1..20: mol_type = genomic RNA
gaaataaaatttaggaccaa

SEQ ID NO: 4451 - RNA, 20 nt, Homo sapiens
  source 1..20: mol_type = genomic RNA
aaataaaatttaggaccaat

SEQ ID NO: 4452 - RNA, 20 nt, Homo sapiens
  source 1..20: mol_type = genomic RNA
aataaaatttaggaccaata

SEQ ID NO: 4453 - RNA, 20 nt, Homo sapiens
  source 1..20: mol_type = genomic RNA
ataaaatttaggaccaatac

SEQ ID NO: 4454 - RNA, 20 nt, Homo sapiens
  source 1..20: mol_type = genomic RNA
taaaatttaggaccaatacc

SEQ ID NO: 4455 - RNA, 20 nt, Homo sapiens
  source 1..20: mol_type = genomic RNA
aaaatttaggaccaatacct

SEQ ID NO: 4456 - RNA, 20 nt, Homo sapiens
  source 1..20: mol_type = genomic RNA
aaatttaggaccaatacctc

SEQ ID NO: 4457 - RNA, 20 nt, Homo sapiens
  source 1..20: mol_type = genomic RNA
aatttaggaccaatacctcc

SEQ ID NO: 4458 - RNA, 20 nt, Homo sapiens
  source 1..20: mol_type = genomic RNA
atttaggaccaatacctcct

SEQ ID NO: 4459 - RNA, 20 nt, Homo sapiens
  source 1..20: mol_type = genomic RNA
tttaggaccaatacctcctc

SEQ ID NO: 4460 - RNA, 20 nt, Homo sapiens
  source 1..20: mol_type = genomic RNA
ttaggaccaatacctcctcc

SEQ ID NO: 4461 - RNA, 20 nt, Homo sapiens
  source 1..20: mol_type = genomic RNA
taggaccaatacctcctcca

SEQ ID NO: 4462 - RNA, 20 nt, Homo sapiens
  source 1..20: mol_type = genomic RNA
aggaccaatacctcctccag

SEQ ID NO: 4463 - RNA, 20 nt, Homo sapiens
  source 1..20: mol_type = genomic RNA
ggaccaatacctcctccaga

SEQ ID NO: 4464 - RNA, 20 nt, Homo sapiens
  source 1..20: mol_type = genomic RNA
gaccaatacctcctccagat

SEQ ID NO: 4465 - RNA, 20 nt, Homo sapiens
  source 1..20: mol_type = genomic RNA
accaatacctcctccagatc

SEQ ID NO: 4466 - RNA, 20 nt, Homo sapiens
  source 1..20: mol_type = genomic RNA
ccaatacctcctccagatca

SEQ ID NO: 4467 - RNA, 20 nt, Homo sapiens
  source 1..20: mol_type = genomic RNA
caatacctcctccagatcag

SEQ ID NO: 4468 - RNA, 20 nt, Homo sapiens
  source 1..20: mol_type = genomic RNA
aatacctcctccagatcaga

SEQ ID NO: 4469 - RNA, 20 nt, Homo sapiens
  source 1..20: mol_type = genomic RNA
atacctcctccagatcagat

SEQ ID NO: 4470 - RNA, 20 nt, Homo sapiens
  source 1..20: mol_type = genomic RNA
tacctcctccagatcagatt

SEQ ID NO: 4471 - RNA, 20 nt, Homo sapiens
  source 1..20: mol_type = genomic RNA
acctcctccagatcagattc

SEQ ID NO: 4472 - RNA, 20 nt, Homo sapiens
  source 1..20: mol_type = genomic RNA
cctcctccagatcagattct

SEQ ID NO: 4473 - RNA, 20 nt, Homo sapiens
  source 1..20: mol_type = genomic RNA
ctcctccagatcagattctt

SEQ ID NO: 4474 - RNA, 20 nt, Homo sapiens
  source 1..20: mol_type = genomic RNA
tcctccagatcagattcttc

SEQ ID NO: 4475 - RNA, 20 nt, Homo sapiens
  source 1..20: mol_type = genomic RNA
cctccagatcagattcttct

SEQ ID NO: 4476 - RNA, 20 nt, Homo sapiens
  source 1..20: mol_type = genomic RNA
ctccagatcagattcttctc

SEQ ID NO: 4477 - RNA, 20 nt, Homo sapiens
  source 1..20: mol_type = genomic RNA
tccagatcagattcttctct

SEQ ID NO: 4478 - RNA, 20 nt, Homo sapiens
  source 1..20: mol_type = genomic RNA
ccagatcagattcttctctt

SEQ ID NO: 4479 - RNA, 20 nt, Homo sapiens
  source 1..20: mol_type = genomic RNA
cagatcagattcttctctta

SEQ ID NO: 4480 - RNA, 20 nt, Homo sapiens
  source 1..20: mol_type = genomic RNA
agatcagattcttctcttaa

SEQ ID NO: 4481 - RNA, 20 nt, Homo sapiens
  source 1..20: mol_type = genomic RNA
gatcagattcttctcttaat

SEQ ID NO: 4482 - RNA, 20 nt, Homo sapiens
  source 1..20: mol_type = genomic RNA
atcagattcttctcttaatt

SEQ ID NO: 4483 - RNA, 20 nt, Homo sapiens
  source 1..20: mol_type = genomic RNA
tcagattcttctcttaattt

SEQ ID NO: 4484 - RNA, 20 nt, Homo sapiens
  source 1..20: mol_type = genomic RNA
cagattcttctcttaatttc

SEQ ID NO: 4485 - RNA, 20 nt, Homo sapiens
  source 1..20: mol_type = genomic RNA
agattcttctcttaatttca

SEQ ID NO: 4486 - RNA, 20 nt, Homo sapiens
  source 1..20: mol_type = genomic RNA
gattcttctcttaatttcat

SEQ ID NO: 4487 - RNA, 20 nt, Homo sapiens
  source 1..20: mol_type = genomic RNA
attcttctcttaatttcata

SEQ ID NO: 4488 - RNA, 20 nt, Homo sapiens
  source 1..20: mol_type = genomic RNA
ttcttctcttaatttcatag

SEQ ID NO: 4489 - RNA, 20 nt, Homo sapiens
  source 1..20: mol_type = genomic RNA
tcttctcttaatttcataga

SEQ ID NO: 4490 - RNA, 20 nt, Homo sapiens
  source 1..20: mol_type = genomic RNA
cttctcttaatttcatagat

SEQ ID NO: 4491 - RNA, 20 nt, Homo sapiens
  source 1..20: mol_type = genomic RNA
ttctcttaatttcatagatt

SEQ ID NO: 4492 - RNA, 20 nt, Homo sapiens
  source 1..20: mol_type = genomic RNA
tctcttaatttcatagattg

SEQ ID NO: 4493 - RNA, 20 nt, Homo sapiens
  source 1..20: mol_type = genomic RNA
ctcttaatttcatagattgt

SEQ ID NO: 4494 - RNA, 20 nt, Homo sapiens
  source 1..20: mol_type = genomic RNA
tcttaatttcatagattgtg

SEQ ID NO: 4495 - RNA, 20 nt, Homo sapiens
  source 1..20: mol_type = genomic RNA
cttaatttcatagattgtgt

SEQ ID NO: 4496 - RNA, 20 nt, Homo sapiens
  source 1..20: mol_type = genomic RNA
ttaatttcatagattgtgtt

SEQ ID NO: 4497 - RNA, 20 nt, Homo sapiens
  source 1..20: mol_type = genomic RNA
taatttcatagattgtgttt

SEQ ID NO: 4498 - RNA, 20 nt, Homo sapiens
  source 1..20: mol_type = genomic RNA
aatttcatagattgtgtttt

SEQ ID NO: 4499 - RNA, 20 nt, Homo sapiens
  source 1..20: mol_type = genomic RNA
atttcatagattgtgttttt

SEQ ID NO: 4500 - RNA, 20 nt, Homo sapiens
  source 1..20: mol_type = genomic RNA
tttcatagattgtgtttttt

SEQ ID NO: 4501 - RNA, 20 nt, Homo sapiens
  source 1..20: mol_type = genomic RNA
ttcatagattgtgttttttt

SEQ ID NO: 4502 - RNA, 20 nt, Homo sapiens
  source 1..20: mol_type = genomic RNA
tcatagattgtgtttttttt

SEQ ID NO: 4503 - RNA, 20 nt, Homo sapiens
  source 1..20: mol_type = genomic RNA
catagattgtgttttttttt

SEQ ID NO: 4504 - RNA, 20 nt, Homo sapiens
  source 1..20: mol_type = genomic RNA
atagattgtgtttttttttt

SEQ ID NO: 4505 - RNA, 20 nt, Homo sapiens
  source 1..20: mol_type = genomic RNA
tagattgtgtttttttttta

SEQ ID NO: 4506 - RNA, 20 nt, Homo sapiens
  source 1..20: mol_type = genomic RNA
agattgtgttttttttttaa

SEQ ID NO: 4507 - RNA, 20 nt, Homo sapiens
  source 1..20: mol_type = genomic RNA
gattgtgttttttttttaaa

SEQ ID NO: 4508 - RNA, 20 nt, Homo sapiens
  source 1..20: mol_type = genomic RNA
attgtgttttttttttaaat

SEQ ID NO: 4509 - RNA, 20 nt, Homo sapiens
  source 1..20: mol_type = genomic RNA
ttgtgttttttttttaaata

SEQ ID NO: 4510 - RNA, 20 nt, Homo sapiens
  source 1..20: mol_type = genomic RNA
tgtgttttttttttaaatag

SEQ ID NO: 4511 - RNA, 20 nt, Homo sapiens
  source 1..20: mol_type = genomic RNA
gtgttttttttttaaataga

SEQ ID NO: 4512 - RNA, 20 nt, Homo sapiens
  source 1..20: mol_type = genomic RNA
tgttttttttttaaatagac

SEQ ID NO: 4513 - RNA, 20 nt, Homo sapiens
  source 1..20: mol_type = genomic RNA
gttttttttttaaatagacc

SEQ ID NO: 4514 - RNA, 20 nt, Homo sapiens
  source 1..20: mol_type = genomic RNA
ttttttttttaaatagacct

SEQ ID NO: 4515 - RNA, 20 nt, Homo sapiens
  source 1..20: mol_type = genomic RNA
tttttttttaaatagacctc

SEQ ID NO: 4516 - RNA, 20 nt, Homo sapiens
  source 1..20: mol_type = genomic RNA
ttttttttaaatagacctct

SEQ ID NO: 4517 - RNA, 20 nt, Homo sapiens
  source 1..20: mol_type = genomic RNA
tttttttaaatagacctctc

SEQ ID NO: 4518 - RNA, 20 nt, Homo sapiens
  source 1..20: mol_type = genomic RNA
ttttttaaatagacctctca

SEQ ID NO: 4519 - RNA, 20 nt, Homo sapiens
  source 1..20: mol_type = genomic RNA
tttttaaatagacctctcaa

SEQ ID NO: 4520 - RNA, 20 nt, Homo sapiens
  source 1..20: mol_type = genomic RNA
ttttaaatagacctctcaat

SEQ ID NO: 4521 - RNA, 20 nt, Homo sapiens
  source 1..20: mol_type = genomic RNA
tttaaatagacctctcaatt

SEQ ID NO: 4522 - RNA, 20 nt, Homo sapiens
  source 1..20: mol_type = genomic RNA
ttaaatagacctctcaattt

SEQ ID NO: 4523 - RNA, 20 nt, Homo sapiens
  source 1..20: mol_type = genomic RNA
taaatagacctctcaatttc

SEQ ID NO: 4524 - RNA, 20 nt, Homo sapiens
  source 1..20: mol_type = genomic RNA
aaatagacctctcaatttct

SEQ ID NO: 4525 - RNA, 20 nt, Homo sapiens
  source 1..20: mol_type = genomic RNA
aatagacctctcaatttctg

SEQ ID NO: 4526 - RNA, 20 nt, Homo sapiens
  source 1..20: mol_type = genomic RNA
atagacctctcaatttctgg

SEQ ID NO: 4527 - RNA, 20 nt, Homo sapiens
  source 1..20: mol_type = genomic RNA
tagacctctcaatttctgga

SEQ ID NO: 4528 - RNA, 20 nt, Homo sapiens
  source 1..20: mol_type = genomic RNA
agacctctcaatttctggaa

SEQ ID NO: 4529 - RNA, 20 nt, Homo sapiens
  source 1..20: mol_type = genomic RNA
gacctctcaatttctggaaa

SEQ ID NO: 4530 - RNA, 20 nt, Homo sapiens
  source 1..20: mol_type = genomic RNA
acctctcaatttctggaaaa

SEQ ID NO: 4531 - RNA, 20 nt, Homo sapiens
  source 1..20: mol_type = genomic RNA
cctctcaatttctggaaaac

SEQ ID NO: 4532 - RNA, 20 nt, Homo sapiens
  source 1..20: mol_type = genomic RNA
ctctcaatttctggaaaact

SEQ ID NO: 4533 - RNA, 20 nt, Homo sapiens
  source 1..20: mol_type = genomic RNA
tctcaatttctggaaaactg

SEQ ID NO: 4534 - RNA, 20 nt, Homo sapiens
  source 1..20: mol_type = genomic RNA
ctcaatttctggaaaactgc

SEQ ID NO: 4535 - RNA, 20 nt, Homo sapiens
  source 1..20: mol_type = genomic RNA
tcaatttctggaaaactgcc

SEQ ID NO: 4536 - RNA, 20 nt, Homo sapiens
  source 1..20: mol_type = genomic RNA
caatttctggaaaactgcct

SEQ ID NO: 4537 - RNA, 20 nt, Homo sapiens
  source 1..20: mol_type = genomic RNA
aatttctggaaaactgcctt

SEQ ID NO: 4538 - RNA, 20 nt, Homo sapiens
  source 1..20: mol_type = genomic RNA
atttctggaaaactgccttt

SEQ ID NO: 4539 - RNA, 20 nt, Homo sapiens
  source 1..20: mol_type = genomic RNA
tttctggaaaactgcctttt

SEQ ID NO: 4540 - RNA, 20 nt, Homo sapiens
  source 1..20: mol_type = genomic RNA
ttctggaaaactgcctttta

SEQ ID NO: 4541 - RNA, 20 nt, Homo sapiens
  source 1..20: mol_type = genomic RNA
tctggaaaactgccttttat

SEQ ID NO: 4542 - RNA, 20 nt, Homo sapiens
  source 1..20: mol_type = genomic RNA
ctggaaaactgccttttatc

SEQ ID NO: 4543 - RNA, 20 nt, Homo sapiens
  source 1..20: mol_type = genomic RNA
tggaaaactgccttttatct

SEQ ID NO: 4544 - RNA, 20 nt, Homo sapiens
  source 1..20: mol_type = genomic RNA
ggaaaactgccttttatctg

SEQ ID NO: 4545 - RNA, 20 nt, Homo sapiens
  source 1..20: mol_type = genomic RNA
gaaaactgccttttatctgc

SEQ ID NO: 4546 - RNA, 20 nt, Homo sapiens
  source 1..20: mol_type = genomic RNA
aaaactgccttttatctgcc

SEQ ID NO: 4547 - RNA, 20 nt, Homo sapiens
  source 1..20: mol_type = genomic RNA
aaactgccttttatctgccc

SEQ ID NO: 4548 - RNA, 20 nt, Homo sapiens
  source 1..20: mol_type = genomic RNA
aactgccttttatctgccca

SEQ ID NO: 4549 - RNA, 20 nt, Homo sapiens
  source 1..20: mol_type = genomic RNA
actgccttttatctgcccag

SEQ ID NO: 4550 - RNA, 20 nt, Homo sapiens
  source 1..20: mol_type = genomic RNA
ctgccttttatctgcccaga

SEQ ID NO: 4551 - RNA, 20 nt, Homo sapiens
  source 1..20: mol_type = genomic RNA
tgccttttatctgcccagaa

SEQ ID NO: 4552 - RNA, 20 nt, Homo sapiens
  source 1..20: mol_type = genomic RNA
gccttttatctgcccagaat

SEQ ID NO: 4553 - RNA, 20 nt, Homo sapiens
  source 1..20: mol_type = genomic RNA
ccttttatctgcccagaatt

SEQ ID NO: 4554 - RNA, 20 nt, Homo sapiens
  source 1..20: mol_type = genomic RNA
cttttatctgcccagaattc

SEQ ID NO: 4555 - RNA, 20 nt, Homo sapiens
  source 1..20: mol_type = genomic RNA
ttttatctgcccagaattct

SEQ ID NO: 4556 - RNA, 20 nt, Homo sapiens
  source 1..20: mol_type = genomic RNA
tttatctgcccagaattcta

SEQ ID NO: 4557 - RNA, 20 nt, Homo sapiens
  source 1..20: mol_type = genomic RNA
ttatctgcccagaattctaa

SEQ ID NO: 4558 - RNA, 20 nt, Homo sapiens
  source 1..20: mol_type = genomic RNA
tatctgcccagaattctaag

SEQ ID NO: 4559 - RNA, 20 nt, Homo sapiens
  source 1..20: mol_type = genomic RNA
atctgcccagaattctaagc

SEQ ID NO: 4560 - RNA, 20 nt, Homo sapiens
  source 1..20: mol_type = genomic RNA
tctgcccagaattctaagct

SEQ ID NO: 4561 - RNA, 20 nt, Homo sapiens
  source 1..20: mol_type = genomic RNA
ctgcccagaattctaagctg

SEQ ID NO: 4562 - RNA, 20 nt, Homo sapiens
  source 1..20: mol_type = genomic RNA
tgcccagaattctaagctgg

SEQ ID NO: 4563 - RNA, 20 nt, Homo sapiens
  source 1..20: mol_type = genomic RNA
gcccagaattctaagctggt

SEQ ID NO: 4564 - RNA, 20 nt, Homo sapiens
  source 1..20: mol_type = genomic RNA
cccagaattctaagctggtg

SEQ ID NO: 4565 - RNA, 20 nt, Homo sapiens
  source 1..20: mol_type = genomic RNA
ccagaattctaagctggtgc

SEQ ID NO: 4566 - RNA, 20 nt, Homo sapiens
  source 1..20: mol_type = genomic RNA
cagaattctaagctggtgcc

SEQ ID NO: 4567 - RNA, 20 nt, Homo sapiens
  source 1..20: mol_type = genomic RNA
agaattctaagctggtgccc

SEQ ID NO: 4568 - RNA, 20 nt, Homo sapiens
  source 1..20: mol_type = genomic RNA
gaattctaagctggtgcccc

SEQ ID NO: 4569 - RNA, 20 nt, Homo sapiens
  source 1..20: mol_type = genomic RNA
aattctaagctggtgcccca

SEQ ID NO: 4570 - RNA, 20 nt, Homo sapiens
  source 1..20: mol_type = genomic RNA
attctaagctggtgccccac

SEQ ID NO: 4571 - RNA, 20 nt, Homo sapiens
  source 1..20: mol_type = genomic RNA
ttctaagctggtgccccact

SEQ ID NO: 4572 - RNA, 20 nt, Homo sapiens
  source 1..20: mol_type = genomic RNA
tctaagctggtgccccactg

SEQ ID NO: 4573 - RNA, 20 nt, Homo sapiens
  source 1..20: mol_type = genomic RNA
ctaagctggtgccccactga

SEQ ID NO: 4574 - RNA, 20 nt, Homo sapiens
  source 1..20: mol_type = genomic RNA
taagctggtgccccactgaa

SEQ ID NO: 4575 - RNA, 20 nt, Homo sapiens
  source 1..20: mol_type = genomic RNA
aagctggtgccccactgaat

SEQ ID NO: 4576 - RNA, 20 nt, Homo sapiens
  source 1..20: mol_type = genomic RNA
agctggtgccccactgaatt

SEQ ID NO: 4577 - RNA, 20 nt, Homo sapiens
  source 1..20: mol_type = genomic RNA
gctggtgccccactgaattt

SEQ ID NO: 4578 - RNA, 20 nt, Homo sapiens
  source 1..20: mol_type = genomic RNA
ctggtgccccactgaatttt

SEQ ID NO: 4579 - RNA, 20 nt, Homo sapiens
  source 1..20: mol_type = genomic RNA
tggtgccccactgaattttg

SEQ ID NO: 4580 - RNA, 20 nt, Homo sapiens
  source 1..20: mol_type = genomic RNA
ggtgccccactgaattttgt

SEQ ID NO: 4581 - RNA, 20 nt, Homo sapiens
  source 1..20: mol_type = genomic RNA
gtgccccactgaattttgtg

SEQ ID NO: 4582 - RNA, 20 nt, Homo sapiens
  source 1..20: mol_type = genomic RNA
tgccccactgaattttgtgt

SEQ ID NO: 4583 - RNA, 20 nt, Homo sapiens
  source 1..20: mol_type = genomic RNA
gccccactgaattttgtgta

SEQ ID NO: 4584 - RNA, 20 nt, Homo sapiens
  source 1..20: mol_type = genomic RNA
ccccactgaattttgtgtac

SEQ ID NO: 4585 - RNA, 20 nt, Homo sapiens
  source 1..20: mol_type = genomic RNA
cccactgaattttgtgtacc

SEQ ID NO: 4586 - RNA, 20 nt, Homo sapiens
  source 1..20: mol_type = genomic RNA
ccactgaattttgtgtacct

SEQ ID NO: 4587 - RNA, 20 nt, Homo sapiens
  source 1..20: mol_type = genomic RNA
cactgaattttgtgtacctg

SEQ ID NO: 4588 - RNA, 20 nt, Homo sapiens
  source 1..20: mol_type = genomic RNA
actgaattttgtgtacctgt

SEQ ID NO: 4589 - RNA, 20 nt, Homo sapiens
  source 1..20: mol_type = genomic RNA
ctgaattttgtgtacctgtg

SEQ ID NO: 4590 - RNA, 20 nt, Homo sapiens
  source 1..20: mol_type = genomic RNA
tgaattttgtgtacctgtga

SEQ ID NO: 4591 - RNA, 20 nt, Homo sapiens
  source 1..20: mol_type = genomic RNA
gaattttgtgtacctgtgac

SEQ ID NO: 4592 - RNA, 20 nt, Homo sapiens
  source 1..20: mol_type = genomic RNA
aattttgtgtacctgtgact

SEQ ID NO: 4593 - RNA, 20 nt, Homo sapiens
  source 1..20: mol_type = genomic RNA
attttgtgtacctgtgacta

SEQ ID NO: 4594 - RNA, 20 nt, Homo sapiens
  source 1..20: mol_type = genomic RNA
ttttgtgtacctgtgactaa

SEQ ID NO: 4595 - RNA, 20 nt, Homo sapiens
  source 1..20: mol_type = genomic RNA
tttgtgtacctgtgactaaa

SEQ ID NO: 4596 - RNA, 20 nt, Homo sapiens
  source 1..20: mol_type = genomic RNA
ttgtgtacctgtgactaaac

SEQ ID NO: 4597 - RNA, 20 nt, Homo sapiens
  source 1..20: mol_type = genomic RNA
tgtgtacctgtgactaaaca

SEQ ID NO: 4598 - RNA, 20 nt, Homo sapiens
  source 1..20: mol_type = genomic RNA
gtgtacctgtgactaaacaa

SEQ ID NO: 4599 - RNA, 20 nt, Homo sapiens
  source 1..20: mol_type = genomic RNA
tgtacctgtgactaaacaac

SEQ ID NO: 4600 - RNA, 20 nt, Homo sapiens
  source 1..20: mol_type = genomic RNA
gtacctgtgactaaacaact

SEQ ID NO: 4601 - RNA, 20 nt, Homo sapiens
  source 1..20: mol_type = genomic RNA
tacctgtgactaaacaacta

SEQ ID NO: 4602 - RNA, 20 nt, Homo sapiens
  source 1..20: mol_type = genomic RNA
acctgtgactaaacaactac

SEQ ID NO: 4603 - RNA, 20 nt, Homo sapiens
  source 1..20: mol_type = genomic RNA
cctgtgactaaacaactacc

SEQ ID NO: 4604 - RNA, 20 nt, Homo sapiens
  source 1..20: mol_type = genomic RNA
ctgtgactaaacaactacct

SEQ ID NO: 4605 - RNA, 20 nt, Homo sapiens
  source 1..20: mol_type = genomic RNA
tgtgactaaacaactacctc

SEQ ID NO: 4606 - RNA, 20 nt, Homo sapiens
  source 1..20: mol_type = genomic RNA
gtgactaaacaactacctcc

SEQ ID NO: 4607 - RNA, 20 nt, Homo sapiens
  source 1..20: mol_type = genomic RNA
tgactaaacaactacctcct

SEQ ID NO: 4608 - RNA, 20 nt, Homo sapiens
  source 1..20: mol_type = genomic RNA
gactaaacaactacctcctc

SEQ ID NO: 4609 - RNA, 20 nt, Homo sapiens
  source 1..20: mol_type = genomic RNA
actaaacaactacctcctca

SEQ ID NO: 4610 - RNA, 20 nt, Homo sapiens
  source 1..20: mol_type = genomic RNA
ctaaacaactacctcctcag

SEQ ID NO: 4611 - RNA, 20 nt, Homo sapiens
  source 1..20: mol_type = genomic RNA
taaacaactacctcctcagt

SEQ ID NO: 4612 - RNA, 20 nt, Homo sapiens
  source 1..20: mol_type = genomic RNA
aaacaactacctcctcagtc

SEQ ID NO: 4613 - RNA, 20 nt, Homo sapiens
  source 1..20: mol_type = genomic RNA
aacaactacctcctcagtct

SEQ ID NO: 4614 - RNA, 20 nt, Homo sapiens
  source 1..20: mol_type = genomic RNA
acaactacctcctcagtctg

SEQ ID NO: 4615 - RNA, 20 nt, Homo sapiens
  source 1..20: mol_type = genomic RNA
caactacctcctcagtctgg

SEQ ID NO: 4616 - RNA, 20 nt, Homo sapiens
  source 1..20: mol_type = genomic RNA
aactacctcctcagtctggg

SEQ ID NO: 4617 - RNA, 20 nt, Homo sapiens
  source 1..20: mol_type = genomic RNA
actacctcctcagtctgggt

SEQ ID NO: 4618 - RNA, 20 nt, Homo sapiens
  source 1..20: mol_type = genomic RNA
ctacctcctcagtctgggtg

SEQ ID NO: 4619 - RNA, 20 nt, Homo sapiens
  source 1..20: mol_type = genomic RNA
tacctcctcagtctgggtgg

SEQ ID NO: 4620 - RNA, 20 nt, Homo sapiens
  source 1..20: mol_type = genomic RNA
acctcctcagtctgggtggg

SEQ ID NO: 4621 - RNA, 20 nt, Homo sapiens
  source 1..20: mol_type = genomic RNA
cctcctcagtctgggtggga

SEQ ID NO: 4622 - RNA, 20 nt, Homo sapiens
  source 1..20: mol_type = genomic RNA
ctcctcagtctgggtgggac

SEQ ID NO: 4623 - RNA, 20 nt, Homo sapiens
  source 1..20: mol_type = genomic RNA
tcctcagtctgggtgggact

SEQ ID NO: 4624 - RNA, 20 nt, Homo sapiens
  source 1..20: mol_type = genomic RNA
cctcagtctgggtgggactt

SEQ ID NO: 4625 - RNA, 20 nt, Homo sapiens
  source 1..20: mol_type = genomic RNA
ctcagtctgggtgggactta

SEQ ID NO: 4626 - RNA, 20 nt, Homo sapiens
  source 1..20: mol_type = genomic RNA
tcagtctgggtgggacttat

SEQ ID NO: 4627 - RNA, 20 nt, Homo sapiens
  source 1..20: mol_type = genomic RNA
cagtctgggtgggacttatg

SEQ ID NO: 4628 - RNA, 20 nt, Homo sapiens
  source 1..20: mol_type = genomic RNA
agtctgggtgggacttatgt

SEQ ID NO: 4629 - RNA, 20 nt, Homo sapiens
  source 1..20: mol_type = genomic RNA
gtctgggtgggacttatgta

SEQ ID NO: 4630 - RNA, 20 nt, Homo sapiens
  source 1..20: mol_type = genomic RNA
tctgggtgggacttatgtat

SEQ ID NO: 4631 - RNA, 20 nt, Homo sapiens
  source 1..20: mol_type = genomic RNA
ctgggtgggacttatgtatt

SEQ ID NO: 4632 - RNA, 20 nt, Homo sapiens
  source 1..20: mol_type = genomic RNA
tgggtgggacttatgtattt

SEQ ID NO: 4633 - RNA, 20 nt, Homo sapiens
  source 1..20: mol_type = genomic RNA
gggtgggacttatgtattta

SEQ ID NO: 4634 - RNA, 20 nt, Homo sapiens
  source 1..20: mol_type = genomic RNA
ggtgggacttatgtatttat

SEQ ID NO: 4635 - RNA, 20 nt, Homo sapiens
  source 1..20: mol_type = genomic RNA
gtgggacttatgtatttatg

SEQ ID NO: 4636 - RNA, 20 nt, Homo sapiens
  source 1..20: mol_type = genomic RNA
tgggacttatgtatttatga

SEQ ID NO: 4637 - RNA, 20 nt, Homo sapiens
  source 1..20: mol_type = genomic RNA
gggacttatgtatttatgac

SEQ ID NO: 4638 - RNA, 20 nt, Homo sapiens
  source 1..20: mol_type = genomic RNA
ggacttatgtatttatgacc

SEQ ID NO: 4639 - RNA, 20 nt, Homo sapiens
  source 1..20: mol_type = genomic RNA
gacttatgtatttatgacct

SEQ ID NO: 4640 - RNA, 20 nt, Homo sapiens
  source 1..20: mol_type = genomic RNA
acttatgtatttatgacctt

SEQ ID NO: 4641 - RNA, 20 nt, Homo sapiens
  source 1..20: mol_type = genomic RNA
cttatgtatttatgacctta

SEQ ID NO: 4642 - RNA, 20 nt, Homo sapiens
  source 1..20: mol_type = genomic RNA
ttatgtatttatgaccttat

SEQ ID NO: 4643 - RNA, 20 nt, Homo sapiens
  source 1..20: mol_type = genomic RNA
tatgtatttatgaccttata

SEQ ID NO: 4644 - RNA, 20 nt, Homo sapiens
  source 1..20: mol_type = genomic RNA
atgtatttatgaccttatag

SEQ ID NO: 4645 - RNA, 20 nt, Homo sapiens
  source 1..20: mol_type = genomic RNA
tgtatttatgaccttatagt

SEQ ID NO: 4646 - RNA, 20 nt, Homo sapiens
  source 1..20: mol_type = genomic RNA
gtatttatgaccttatagtg

SEQ ID NO: 4647 - RNA, 20 nt, Homo sapiens
  source 1..20: mol_type = genomic RNA
tatttatgaccttatagtgt

SEQ ID NO: 4648 - RNA, 20 nt, Homo sapiens
  source 1..20: mol_type = genomic RNA
atttatgaccttatagtgtt

SEQ ID NO: 4649 - RNA, 20 nt, Homo sapiens
  source 1..20: mol_type = genomic RNA
tttatgaccttatagtgtta

SEQ ID NO: 4650 - RNA, 20 nt, Homo sapiens
  source 1..20: mol_type = genomic RNA
ttatgaccttatagtgttaa

SEQ ID NO: 4651 - RNA, 20 nt, Homo sapiens
  source 1..20: mol_type = genomic RNA
tatgaccttatagtgttaat

SEQ ID NO: 4652 - RNA, 20 nt, Homo sapiens
  source 1..20: mol_type = genomic RNA
atgaccttatagtgttaata

SEQ ID NO: 4653 - RNA, 20 nt, Homo sapiens
  source 1..20: mol_type = genomic RNA
tgaccttatagtgttaatat

SEQ ID NO: 4654 - RNA, 20 nt, Homo sapiens
  source 1..20: mol_type = genomic RNA
gaccttatagtgttaatatc

SEQ ID NO: 4655 - RNA, 20 nt, Homo sapiens
  source 1..20: mol_type = genomic RNA
accttatagtgttaatatct

SEQ ID NO: 4656 - RNA, 20 nt, Homo sapiens
  source 1..20: mol_type = genomic RNA
ccttatagtgttaatatctt

SEQ ID NO: 4657 - RNA, 20 nt, Homo sapiens
  source 1..20: mol_type = genomic RNA
cttatagtgttaatatcttg

SEQ ID NO: 4658 - RNA, 20 nt, Homo sapiens
  source 1..20: mol_type = genomic RNA
ttatagtgttaatatcttga

SEQ ID NO: 4659 - RNA, 20 nt, Homo sapiens
  source 1..20: mol_type = genomic RNA
tatagtgttaatatcttgaa

SEQ ID NO: 4660 - RNA, 20 nt, Homo sapiens
  source 1..20: mol_type = genomic RNA
atagtgttaatatcttgaaa

SEQ ID NO: 4661 - RNA, 20 nt, Homo sapiens
  source 1..20: mol_type = genomic RNA
tagtgttaatatcttgaaac

SEQ ID NO: 4662 - RNA, 20 nt, Homo sapiens
  source 1..20: mol_type = genomic RNA
agtgttaatatcttgaaaca

SEQ ID NO: 4663 - RNA, 20 nt, Homo sapiens
  source 1..20: mol_type = genomic RNA
gtgttaatatcttgaaacat

SEQ ID NO: 4664 - RNA, 20 nt, Homo sapiens
  source 1..20: mol_type = genomic RNA
tgttaatatcttgaaacata

SEQ ID NO: 4665 - RNA, 20 nt, Homo sapiens
  source 1..20: mol_type = genomic RNA
gttaatatcttgaaacatag

SEQ ID NO: 4666 - RNA, 20 nt, Homo sapiens
  source 1..20: mol_type = genomic RNA
ttaatatcttgaaacataga

SEQ ID NO: 4667 - RNA, 20 nt, Homo sapiens
  source 1..20: mol_type = genomic RNA
taatatcttgaaacatagag

SEQ ID NO: 4668 - RNA, 20 nt, Homo sapiens
  source 1..20: mol_type = genomic RNA
aatatcttgaaacatagaga

SEQ ID NO: 4669 - RNA, 20 nt, Homo sapiens
  source 1..20: mol_type = genomic RNA
atatcttgaaacatagagat

SEQ ID NO: 4670 - RNA, 20 nt, Homo sapiens
  source 1..20: mol_type = genomic RNA
tatcttgaaacatagagatc

SEQ ID NO: 4671 - RNA, 20 nt, Homo sapiens
  source 1..20: mol_type = genomic RNA
atcttgaaacatagagatct

SEQ ID NO: 4672 - RNA, 20 nt, Homo sapiens
  source 1..20: mol_type = genomic RNA
tcttgaaacatagagatcta

SEQ ID NO: 4673 - RNA, 20 nt, Homo sapiens
  source 1..20: mol_type = genomic RNA
cttgaaacatagagatctat

SEQ ID NO: 4674 - RNA, 20 nt, Homo sapiens
  source 1..20: mol_type = genomic RNA
ttgaaacatagagatctatg

SEQ ID NO: 4675 - RNA, 20 nt, Homo sapiens
  source 1..20: mol_type = genomic RNA
tgaaacatagagatctatgt

SEQ ID NO: 4676 - RNA, 20 nt, Homo sapiens
  source 1..20: mol_type = genomic RNA
gaaacatagagatctatgta

SEQ ID NO: 4677 - RNA, 20 nt, Homo sapiens
  source 1..20: mol_type = genomic RNA
aaacatagagatctatgtac

SEQ ID NO: 4678 - RNA, 20 nt, Homo sapiens
  source 1..20: mol_type = genomic RNA
aacatagagatctatgtact

SEQ ID NO: 4679 - RNA, 20 nt, Homo sapiens
  source 1..20: mol_type = genomic RNA
acatagagatctatgtactg

SEQ ID NO: 4680 - RNA, 20 nt, Homo sapiens
  source 1..20: mol_type = genomic RNA
catagagatctatgtactgt

SEQ ID NO: 4681 - RNA, 20 nt, Homo sapiens
  source 1..20: mol_type = genomic RNA
atagagatctatgtactgta

SEQ ID NO: 4682 - RNA, 20 nt, Homo sapiens
  source 1..20: mol_type = genomic RNA
tagagatctatgtactgtaa

SEQ ID NO: 4683 - RNA, 20 nt, Homo sapiens
  source 1..20: mol_type = genomic RNA
agagatctatgtactgtaat

SEQ ID NO: 4684 - RNA, 20 nt, Homo sapiens
  source 1..20: mol_type = genomic RNA
gagatctatgtactgtaata

SEQ ID NO: 4685 - RNA, 20 nt, Homo sapiens
  source 1..20: mol_type = genomic RNA
agatctatgtactgtaatag

SEQ ID NO: 4686 - RNA, 20 nt, Homo sapiens
  source 1..20: mol_type = genomic RNA
gatctatgtactgtaatagt

SEQ ID NO: 4687 - RNA, 20 nt, Homo sapiens
  source 1..20: mol_type = genomic RNA
atctatgtactgtaatagtg

SEQ ID NO: 4688 - RNA, 20 nt, Homo sapiens
  source 1..20: mol_type = genomic RNA
tctatgtactgtaatagtgt

SEQ ID NO: 4689 - RNA, 20 nt, Homo sapiens
  source 1..20: mol_type = genomic RNA
ctatgtactgtaatagtgtg

SEQ ID NO: 4690 - RNA, 20 nt, Homo sapiens
  source 1..20: mol_type = genomic RNA
tatgtactgtaatagtgtga

SEQ ID NO: 4691 - RNA, 20 nt, Homo sapiens
  source 1..20: mol_type = genomic RNA
atgtactgtaatagtgtgat

SEQ ID NO: 4692 - RNA, 20 nt, Homo sapiens
  source 1..20: mol_type = genomic RNA
tgtactgtaatagtgtgatt

SEQ ID NO: 4693 - RNA, 20 nt, Homo sapiens
  source 1..20: mol_type = genomic RNA
gtactgtaatagtgtgatta

SEQ ID NO: 4694 - RNA, 20 nt, Homo sapiens
  source 1..20: mol_type = genomic RNA
tactgtaatagtgtgattac

SEQ ID NO: 4695 - RNA, 20 nt, Homo sapiens
  source 1..20: mol_type = genomic RNA
actgtaatagtgtgattact

SEQ ID NO: 4696 - RNA, 20 nt, Homo sapiens
  source 1..20: mol_type = genomic RNA
ctgtaatagtgtgattacta

SEQ ID NO: 4697 - RNA, 20 nt, Homo sapiens
  source 1..20: mol_type = genomic RNA
tgtaatagtgtgattactat

SEQ ID NO: 4698 - RNA, 20 nt, Homo sapiens
  source 1..20: mol_type = genomic RNA
gtaatagtgtgattactatg

SEQ ID NO: 4699 - RNA, 20 nt, Homo sapiens
  source 1..20: mol_type = genomic RNA
taatagtgtgattactatgc

SEQ ID NO: 4700 - RNA, 20 nt, Homo sapiens
  source 1..20: mol_type = genomic RNA
aatagtgtgattactatgct

SEQ ID NO: 4701 - RNA, 20 nt, Homo sapiens
  source 1..20: mol_type = genomic RNA
atagtgtgattactatgctc

SEQ ID NO: 4702 - RNA, 20 nt, Homo sapiens
  source 1..20: mol_type = genomic RNA
tagtgtgattactatgctct

SEQ ID NO: 4703 - RNA, 20 nt, Homo sapiens
  source 1..20: mol_type = genomic RNA
agtgtgattactatgctcta

SEQ ID NO: 4704 - RNA, 20 nt, Homo sapiens
  source 1..20: mol_type = genomic RNA
gtgtgattactatgctctag

SEQ ID NO: 4705 - RNA, 20 nt, Homo sapiens
  source 1..20: mol_type = genomic RNA
tgtgattactatgctctaga

SEQ ID NO: 4706 - RNA, 20 nt, Homo sapiens
  source 1..20: mol_type = genomic RNA
gtgattactatgctctagag

SEQ ID NO: 4707 - RNA, 20 nt, Homo sapiens
  source 1..20: mol_type = genomic RNA
tgattactatgctctagaga

SEQ ID NO: 4708 - RNA, 20 nt, Homo sapiens
  source 1..20: mol_type = genomic RNA
gattactatgctctagagaa

SEQ ID NO: 4709 - RNA, 20 nt, Homo sapiens
  source 1..20: mol_type = genomic RNA
attactatgctctagagaaa

SEQ ID NO: 4710 - RNA, 20 nt, Homo sapiens
  source 1..20: mol_type = genomic RNA
ttactatgctctagagaaaa

SEQ ID NO: 4711 - RNA, 20 nt, Homo sapiens
  source 1..20: mol_type = genomic RNA
tactatgctctagagaaaag

SEQ ID NO: 4712 - RNA, 20 nt, Homo sapiens
  source 1..20: mol_type = genomic RNA
actatgctctagagaaaagt

SEQ ID NO: 4713 - RNA, 20 nt, Homo sapiens
  source 1..20: mol_type = genomic RNA
ctatgctctagagaaaagtc

SEQ ID NO: 4714 - RNA, 20 nt, Homo sapiens
  source 1..20: mol_type = genomic RNA
tatgctctagagaaaagtct

SEQ ID NO: 4715 - RNA, 20 nt, Homo sapiens
  source 1..20: mol_type = genomic RNA
atgctctagagaaaagtcta

SEQ ID NO: 4716 - RNA, 20 nt, Homo sapiens
  source 1..20: mol_type = genomic RNA
tgctctagagaaaagtctac

SEQ ID NO: 4717 - RNA, 20 nt, Homo sapiens
  source 1..20: mol_type = genomic RNA
gctctagagaaaagtctacc

SEQ ID NO: 4718 - RNA, 20 nt, Homo sapiens
  source 1..20: mol_type = genomic RNA
ctctagagaaaagtctaccc

SEQ ID NO: 4719 - RNA, 20 nt, Homo sapiens
  source 1..20: mol_type = genomic RNA
tctagagaaaagtctacccc

SEQ ID NO: 4720 - RNA, 20 nt, Homo sapiens
  source 1..20: mol_type = genomic RNA
ctagagaaaagtctacccct

SEQ ID NO: 4721 - RNA, 20 nt, Homo sapiens
  source 1..20: mol_type = genomic RNA
tagagaaaagtctacccctg

SEQ ID NO: 4722 - RNA, 20 nt, Homo sapiens
  source 1..20: mol_type = genomic RNA
agagaaaagtctacccctgc

SEQ ID NO: 4723 - RNA, 20 nt, Homo sapiens
  source 1..20: mol_type = genomic RNA
gagaaaagtctacccctgct

SEQ ID NO: 4724 - RNA, 20 nt, Homo sapiens
  source 1..20: mol_type = genomic RNA
agaaaagtctacccctgcta

SEQ ID NO: 4725 - RNA, 20 nt, Homo sapiens
  source 1..20: mol_type = genomic RNA
gaaaagtctacccctgctaa

SEQ ID NO: 4726 - RNA, 20 nt, Homo sapiens
  source 1..20: mol_type = genomic RNA
aaaagtctacccctgctaag

SEQ ID NO: 4727 - RNA, 20 nt, Homo sapiens
  source 1..20: mol_type = genomic RNA
aaagtctacccctgctaagg

SEQ ID NO: 4728 - RNA, 20 nt, Homo sapiens
  source 1..20: mol_type = genomic RNA
aagtctacccctgctaagga

SEQ ID NO: 4729 - RNA, 20 nt, Homo sapiens
  source 1..20: mol_type = genomic RNA
agtctacccctgctaaggag

SEQ ID NO: 4730 - RNA, 20 nt, Homo sapiens
  source 1..20: mol_type = genomic RNA
gtctacccctgctaaggagt

SEQ ID NO: 4731 - RNA, 20 nt, Homo sapiens
  source 1..20: mol_type = genomic RNA
tctacccctgctaaggagtt

SEQ ID NO: 4732 - RNA, 20 nt, Homo sapiens
  source 1..20: mol_type = genomic RNA
ctacccctgctaaggagttc

SEQ ID NO: 4733 - RNA, 20 nt, Homo sapiens
  source 1..20: mol_type = genomic RNA
tacccctgctaaggagttct

SEQ ID NO: 4734 - RNA, 20 nt, Homo sapiens
  source 1..20: mol_type = genomic RNA
acccctgctaaggagttctc

SEQ ID NO: 4735 - RNA, 20 nt, Homo sapiens
  source 1..20: mol_type = genomic RNA
cccctgctaaggagttctca

SEQ ID NO: 4736 - RNA, 20 nt, Homo sapiens
  source 1..20: mol_type = genomic RNA
ccctgctaaggagttctcat

SEQ ID NO: 4737 - RNA, 20 nt, Homo sapiens
  source 1..20: mol_type = genomic RNA
cctgctaaggagttctcatc

SEQ ID NO: 4738 - RNA, 20 nt, Homo sapiens
  source 1..20: mol_type = genomic RNA
ctgctaaggagttctcatcc

SEQ ID NO: 4739 - RNA, 20 nt, Homo sapiens
  source 1..20: mol_type = genomic RNA
tgctaaggagttctcatccc

SEQ ID NO: 4740 - RNA, 20 nt, Homo sapiens
  source 1..20: mol_type = genomic RNA
gctaaggagttctcatccct

SEQ ID NO: 4741 - RNA, 20 nt, Homo sapiens
  source 1..20: mol_type = genomic RNA
ctaaggagttctcatccctc

SEQ ID NO: 4742 - RNA, 20 nt, Homo sapiens
  source 1..20: mol_type = genomic RNA
taaggagttctcatccctct

SEQ ID NO: 4743 - RNA, 20 nt, Homo sapiens
  source 1..20: mol_type = genomic RNA
aaggagttctcatccctctg

SEQ ID NO: 4744 - RNA, 20 nt, Homo sapiens
  source 1..20: mol_type = genomic RNA
aggagttctcatccctctgt

SEQ ID NO: 4745 - RNA, 20 nt, Homo sapiens
  source 1..20: mol_type = genomic RNA
ggagttctcatccctctgtc

SEQ ID NO: 4746 - RNA, 20 nt, Homo sapiens
  source 1..20: mol_type = genomic RNA
gagttctcatccctctgtca

SEQ ID NO: 4747 - RNA, 20 nt, Homo sapiens
  source 1..20: mol_type = genomic RNA
agttctcatccctctgtcag

SEQ ID NO: 4748 - RNA, 20 nt, Homo sapiens
  source 1..20: mol_type = genomic RNA
gttctcatccctctgtcagg

SEQ ID NO: 4749 - RNA, 20 nt, Homo sapiens
  source 1..20: mol_type = genomic RNA
ttctcatccctctgtcaggg

SEQ ID NO: 4750 - RNA, 20 nt, Homo sapiens
  source 1..20: mol_type = genomic RNA
tctcatccctctgtcagggt

SEQ ID NO: 4751 - RNA, 20 nt, Homo sapiens
  source 1..20: mol_type = genomic RNA
ctcatccctctgtcagggtc

SEQ ID NO: 4752 - RNA, 20 nt, Homo sapiens
  source 1..20: mol_type = genomic RNA
tcatccctctgtcagggtca

SEQ ID NO: 4753 - RNA, 20 nt, Homo sapiens
  source 1..20: mol_type = genomic RNA
catccctctgtcagggtcag

SEQ ID NO: 4754 - RNA, 20 nt, Homo sapiens
  source 1..20: mol_type = genomic RNA
atccctctgtcagggtcagt

SEQ ID NO: 4755 - RNA, 20 nt, Homo sapiens
  source 1..20: mol_type = genomic RNA
tccctctgtcagggtcagta

SEQ ID NO: 4756 - RNA, 20 nt, Homo sapiens
  source 1..20: mol_type = genomic RNA
ccctctgtcagggtcagtaa

SEQ ID NO: 4757 - RNA, 20 nt, Homo sapiens
  source 1..20: mol_type = genomic RNA
cctctgtcagggtcagtaag

SEQ ID NO: 4758 - RNA, 20 nt, Homo sapiens
  source 1..20: mol_type = genomic RNA
ctctgtcagggtcagtaagg

SEQ ID NO: 4759 - RNA, 20 nt, Homo sapiens
  source 1..20: mol_type = genomic RNA
tctgtcagggtcagtaagga

SEQ ID NO: 4760 - RNA, 20 nt, Homo sapiens
  source 1..20: mol_type = genomic RNA
ctgtcagggtcagtaaggaa

SEQ ID NO: 4761 - RNA, 20 nt, Homo sapiens
  source 1..20: mol_type = genomic RNA
tgtcagggtcagtaaggaaa

SEQ ID NO: 4762 - RNA, 20 nt, Homo sapiens
  source 1..20: mol_type = genomic RNA
gtcagggtcagtaaggaaaa

SEQ ID NO: 4763 - RNA, 20 nt, Homo sapiens
  source 1..20: mol_type = genomic RNA
tcagggtcagtaaggaaaac

SEQ ID NO: 4764 - RNA, 20 nt, Homo sapiens
  source 1..20: mol_type = genomic RNA
cagggtcagtaaggaaaacg

SEQ ID NO: 4765 - RNA, 20 nt, Homo sapiens
  source 1..20: mol_type = genomic RNA
agggtcagtaaggaaaacgg

SEQ ID NO: 4766 - RNA, 20 nt, Homo sapiens
  source 1..20: mol_type = genomic RNA
gggtcagtaaggaaaacggt

SEQ ID NO: 4767 - RNA, 20 nt, Homo sapiens
  source 1..20: mol_type = genomic RNA
ggtcagtaaggaaaacggtg

SEQ ID NO: 4768 - RNA, 20 nt, Homo sapiens
  source 1..20: mol_type = genomic RNA
gtcagtaaggaaaacggtgg

SEQ ID NO: 4769 - RNA, 20 nt, Homo sapiens
  source 1..20: mol_type = genomic RNA
tcagtaaggaaaacggtggc

SEQ ID NO: 4770 - RNA, 20 nt, Homo sapiens
  source 1..20: mol_type = genomic RNA
cagtaaggaaaacggtggcc

SEQ ID NO: 4771 - RNA, 20 nt, Homo sapiens
  source 1..20: mol_type = genomic RNA
agtaaggaaaacggtggcct

SEQ ID NO: 4772 - RNA, 20 nt, Homo sapiens
  source 1..20: mol_type = genomic RNA
gtaaggaaaacggtggccta

SEQ ID NO: 4773 - RNA, 20 nt, Homo sapiens
  source 1..20: mol_type = genomic RNA
taaggaaaacggtggcctag

SEQ ID NO: 4774 - RNA, 20 nt, Homo sapiens
  source 1..20: mol_type = genomic RNA
aaggaaaacggtggcctagg

SEQ ID NO: 4775 - RNA, 20 nt, Homo sapiens
  source 1..20: mol_type = genomic RNA
aggaaaacggtggcctaggg

SEQ ID NO: 4776 - RNA, 20 nt, Homo sapiens
  source 1..20: mol_type = genomic RNA
ggaaaacggtggcctagggt

SEQ ID NO: 4777 - RNA, 20 nt, Homo sapiens
  source 1..20: mol_type = genomic RNA
gaaaacggtggcctagggta

SEQ ID NO: 4778 - RNA, 20 nt, Homo sapiens
  source 1..20: mol_type = genomic RNA
aaaacggtggcctagggtac

SEQ ID NO: 4779 - RNA, 20 nt, Homo sapiens
  source 1..20: mol_type = genomic RNA
aaacggtggcctagggtaca

SEQ ID NO: 4780 - RNA, 20 nt, Homo sapiens
  source 1..20: mol_type = genomic RNA
aacggtggcctagggtacag

SEQ ID NO: 4781 - RNA, 20 nt, Homo sapiens
  source 1..20: mol_type = genomic RNA
acggtggcctagggtacagg

SEQ ID NO: 4782 - RNA, 20 nt, Homo sapiens
  source 1..20: mol_type = genomic RNA
cggtggcctagggtacaggc

SEQ ID NO: 4783 - RNA, 20 nt, Homo sapiens
  source 1..20: mol_type = genomic RNA
ggtggcctagggtacaggca

SEQ ID NO: 4784 - RNA, 20 nt, Homo sapiens
  source 1..20: mol_type = genomic RNA
gtggcctagggtacaggcaa

SEQ ID NO: 4785 - RNA, 20 nt, Homo sapiens
  source 1..20: mol_type = genomic RNA
tggcctagggtacaggcaac

SEQ ID NO: 4786 - RNA, 20 nt, Homo sapiens
  source 1..20: mol_type = genomic RNA
ggcctagggtacaggcaaca

SEQ ID NO: 4787 - RNA, 20 nt, Homo sapiens
  source 1..20: mol_type = genomic RNA
gcctagggtacaggcaacaa

SEQ ID NO: 4788 - RNA, 20 nt, Homo sapiens
  source 1..20: mol_type = genomic RNA
cctagggtacaggcaacaat

SEQ ID NO: 4789 - RNA, 20 nt, Homo sapiens
  source 1..20: mol_type = genomic RNA
ctagggtacaggcaacaatg

SEQ ID NO: 4790 - RNA, 20 nt, Homo sapiens
  source 1..20: mol_type = genomic RNA
tagggtacaggcaacaatga

SEQ ID NO: 4791 - RNA, 20 nt, Homo sapiens
  source 1..20: mol_type = genomic RNA
agggtacaggcaacaatgag

SEQ ID NO: 4792 - RNA, 20 nt, Homo sapiens
  source 1..20: mol_type = genomic RNA
gggtacaggcaacaatgagc

SEQ ID NO: 4793 - RNA, 20 nt, Homo sapiens
  source 1..20: mol_type = genomic RNA
ggtacaggcaacaatgagca

SEQ ID NO: 4794 - RNA, 20 nt, Homo sapiens
  source 1..20: mol_type = genomic RNA
gtacaggcaacaatgagcag

SEQ ID NO: 4795 - RNA, 20 nt, Homo sapiens
  source 1..20: mol_type = genomic RNA
tacaggcaacaatgagcaga

SEQ ID NO: 4796 - RNA, 20 nt, Homo sapiens
  source 1..20: mol_type = genomic RNA
acaggcaacaatgagcagac

SEQ ID NO: 4797 - RNA, 20 nt, Homo sapiens
  source 1..20: mol_type = genomic RNA
caggcaacaatgagcagacc

SEQ ID NO: 4798 - RNA, 20 nt, Homo sapiens
  source 1..20: mol_type = genomic RNA
aggcaacaatgagcagacca

SEQ ID NO: 4799 - RNA, 20 nt, Homo sapiens
  source 1..20: mol_type = genomic RNA
ggcaacaatgagcagaccaa

SEQ ID NO: 4800 - RNA, 20 nt, Homo sapiens
  source 1..20: mol_type = genomic RNA
gcaacaatgagcagaccaac

SEQ ID NO: 4801 - RNA, 20 nt, Homo sapiens
  source 1..20: mol_type = genomic RNA
caacaatgagcagaccaacc

SEQ ID NO: 4802 - RNA, 20 nt, Homo sapiens
  source 1..20: mol_type = genomic RNA
aacaatgagcagaccaacct

SEQ ID NO: 4803 - RNA, 20 nt, Homo sapiens
  source 1..20: mol_type = genomic RNA
acaatgagcagaccaaccta

SEQ ID NO: 4804 - RNA, 20 nt, Homo sapiens
  source 1..20: mol_type = genomic RNA
caatgagcagaccaacctaa

SEQ ID NO: 4805 - RNA, 20 nt, Homo sapiens
  source 1..20: mol_type = genomic RNA
aatgagcagaccaacctaaa

SEQ ID NO: 4806 - RNA, 20 nt, Homo sapiens
  source 1..20: mol_type = genomic RNA
atgagcagaccaacctaaat

SEQ ID NO: 4807 - RNA, 20 nt, Homo sapiens
  source 1..20: mol_type = genomic RNA
tgagcagaccaacctaaatt

SEQ ID NO: 4808 - RNA, 20 nt, Homo sapiens
  source 1..20: mol_type = genomic RNA
gagcagaccaacctaaattt

SEQ ID NO: 4809 - RNA, 20 nt, Homo sapiens
  source 1..20: mol_type = genomic RNA
agcagaccaacctaaatttg

SEQ ID NO: 4810 - RNA, 20 nt, Homo sapiens
  source 1..20: mol_type = genomic RNA
gcagaccaacctaaatttgg

SEQ ID NO: 4811 - RNA, 20 nt, Homo sapiens
  source 1..20: mol_type = genomic RNA
cagaccaacctaaatttggg

SEQ ID NO: 4812 - RNA, 20 nt, Homo sapiens
  source 1..20: mol_type = genomic RNA
agaccaacctaaatttgggg

SEQ ID NO: 4813 - RNA, 20 nt, Homo sapiens
  source 1..20: mol_type = genomic RNA
gaccaacctaaatttgggga

SEQ ID NO: 4814 - RNA, 20 nt, Homo sapiens
  source 1..20: mol_type = genomic RNA
accaacctaaatttggggaa

SEQ ID NO: 4815 - RNA, 20 nt, Homo sapiens
  source 1..20: mol_type = genomic RNA
ccaacctaaatttggggaaa

SEQ ID NO: 4816 - RNA, 20 nt, Homo sapiens
  source 1..20: mol_type = genomic RNA
caacctaaatttggggaaat

SEQ ID NO: 4817 - RNA, 20 nt, Homo sapiens
  source 1..20: mol_type = genomic RNA
aacctaaatttggggaaatt

SEQ ID NO: 4818 - RNA, 20 nt, Homo sapiens
  source 1..20: mol_type = genomic RNA
acctaaatttggggaaatta

SEQ ID NO: 4819 - RNA, 20 nt, Homo sapiens
  source 1..20: mol_type = genomic RNA
cctaaatttggggaaattag

SEQ ID NO: 4820 - RNA, 20 nt, Homo sapiens
  source 1..20: mol_type = genomic RNA
ctaaatttggggaaattagg

SEQ ID NO: 4821 - RNA, 20 nt, Homo sapiens
  source 1..20: mol_type = genomic RNA
taaatttggggaaattagga

SEQ ID NO: 4822 - RNA, 20 nt, Homo sapiens
  source 1..20: mol_type = genomic RNA
aaatttggggaaattaggag

SEQ ID NO: 4823 - RNA, 20 nt, Homo sapiens
  source 1..20: mol_type = genomic RNA
aatttggggaaattaggaga

SEQ ID NO: 4824 - RNA, 20 nt, Homo sapiens
  source 1..20: mol_type = genomic RNA
atttggggaaattaggagag

SEQ ID NO: 4825 - RNA, 20 nt, Homo sapiens
  source 1..20: mol_type = genomic RNA
tttggggaaattaggagagg

SEQ ID NO: 4826 - RNA, 20 nt, Homo sapiens
  source 1..20: mol_type = genomic RNA
ttggggaaattaggagaggc

SEQ ID NO: 4827 - RNA, 20 nt, Homo sapiens
  source 1..20: mol_type = genomic RNA
tggggaaattaggagaggca

SEQ ID NO: 4828 - RNA, 20 nt, Homo sapiens
  source 1..20: mol_type = genomic RNA
ggggaaattaggagaggcag

SEQ ID NO: 4829 - RNA, 20 nt, Homo sapiens
  source 1..20: mol_type = genomic RNA
gggaaattaggagaggcaga

SEQ ID NO: 4830 - RNA, 20 nt, Homo sapiens
  source 1..20: mol_type = genomic RNA
ggaaattaggagaggcagag

SEQ ID NO: 4831 - RNA, 20 nt, Homo sapiens
  source 1..20: mol_type = genomic RNA
gaaattaggagaggcagaga

SEQ ID NO: 4832 - RNA, 20 nt, Homo sapiens
  source 1..20: mol_type = genomic RNA
aaattaggagaggcagagat

SEQ ID NO: 4833 - RNA, 20 nt, Homo sapiens
  source 1..20: mol_type = genomic RNA
aattaggagaggcagagata

SEQ ID NO: 4834 - RNA, 20 nt, Homo sapiens
  source 1..20: mol_type = genomic RNA
attaggagaggcagagatag

SEQ ID NO: 4835 - RNA, 20 nt, Homo sapiens
  source 1..20: mol_type = genomic RNA
ttaggagaggcagagataga

SEQ ID NO: 4836 - RNA, 20 nt, Homo sapiens
  source 1..20: mol_type = genomic RNA
taggagaggcagagatagaa

SEQ ID NO: 4837 - RNA, 20 nt, Homo sapiens
  source 1..20: mol_type = genomic RNA
aggagaggcagagatagaac

SEQ ID NO: 4838 - RNA, 20 nt, Homo sapiens
  source 1..20: mol_type = genomic RNA
ggagaggcagagatagaacc

SEQ ID NO: 4839 - RNA, 20 nt, Homo sapiens
  source 1..20: mol_type = genomic RNA
gagaggcagagatagaacct

SEQ ID NO: 4840 - RNA, 20 nt, Homo sapiens
  source 1..20: mol_type = genomic RNA
agaggcagagatagaacctg

SEQ ID NO: 4841 - RNA, 20 nt, Homo sapiens
  source 1..20: mol_type = genomic RNA
gaggcagagatagaacctgg

SEQ ID NO: 4842 - RNA, 20 nt, Homo sapiens
  source 1..20: mol_type = genomic RNA
aggcagagatagaacctgga

SEQ ID NO: 4843 - RNA, 20 nt, Homo sapiens
  source 1..20: mol_type = genomic RNA
ggcagagatagaacctggag

SEQ ID NO: 4844 - RNA, 20 nt, Homo sapiens
  source 1..20: mol_type = genomic RNA
gcagagatagaacctggagc

SEQ ID NO: 4845 - RNA, 20 nt, Homo sapiens
  source 1..20: mol_type = genomic RNA
cagagatagaacctggagcc

SEQ ID NO: 4846 - RNA, 20 nt, Homo sapiens
  source 1..20: mol_type = genomic RNA
agagatagaacctggagcca

SEQ ID NO: 4847 - RNA, 20 nt, Homo sapiens
  source 1..20: mol_type = genomic RNA
gagatagaacctggagccac

SEQ ID NO: 4848 - RNA, 20 nt, Homo sapiens
  source 1..20: mol_type = genomic RNA
agatagaacctggagccact

SEQ ID NO: 4849 - RNA, 20 nt, Homo sapiens
  source 1..20: mol_type = genomic RNA
gatagaacctggagccactt

SEQ ID NO: 4850 - RNA, 20 nt, Homo sapiens
  source 1..20: mol_type = genomic RNA
atagaacctggagccacttc

SEQ ID NO: 4851 - RNA, 20 nt, Homo sapiens
  source 1..20: mol_type = genomic RNA
tagaacctggagccacttct

SEQ ID NO: 4852 - RNA, 20 nt, Homo sapiens
  source 1..20: mol_type = genomic RNA
agaacctggagccacttcta

SEQ ID NO: 4853 - RNA, 20 nt, Homo sapiens
  source 1..20: mol_type = genomic RNA
gaacctggagccacttctat

SEQ ID NO: 4854 - RNA, 20 nt, Homo sapiens
  source 1..20: mol_type = genomic RNA
aacctggagccacttctatc

SEQ ID NO: 4855 - RNA, 20 nt, Homo sapiens
  source 1..20: mol_type = genomic RNA
acctggagccacttctatct

SEQ ID NO: 4856 - RNA, 20 nt, Homo sapiens
  source 1..20: mol_type = genomic RNA
cctggagccacttctatctg

SEQ ID NO: 4857 - RNA, 20 nt, Homo sapiens
  source 1..20: mol_type = genomic RNA
ctggagccacttctatctgg

SEQ ID NO: 4858 - RNA, 20 nt, Homo sapiens
  source 1..20: mol_type = genomic RNA
tggagccacttctatctggg

SEQ ID NO: 4859 - RNA, 20 nt, Homo sapiens
  source 1..20: mol_type = genomic RNA
ggagccacttctatctgggc

SEQ ID NO: 4860 - RNA, 20 nt, Homo sapiens
  source 1..20: mol_type = genomic RNA
gagccacttctatctgggct

SEQ ID NO: 4861 - RNA, 20 nt, Homo sapiens
  source 1..20: mol_type = genomic RNA
agccacttctatctgggctg

SEQ ID NO: 4862 - RNA, 20 nt, Homo sapiens
  source 1..20: mol_type = genomic RNA
gccacttctatctgggctgt

SEQ ID NO: 4863 - RNA, 20 nt, Homo sapiens
  source 1..20: mol_type = genomic RNA
ccacttctatctgggctgtt

SEQ ID NO: 4864 - RNA, 20 nt, Homo sapiens
  source 1..20: mol_type = genomic RNA
cacttctatctgggctgttg

SEQ ID NO: 4865 - RNA, 20 nt, Homo sapiens
  source 1..20: mol_type = genomic RNA
acttctatctgggctgttgc

SEQ ID NO: 4866 - RNA, 20 nt, Homo sapiens
  source 1..20: mol_type = genomic RNA
cttctatctgggctgttgct

SEQ ID NO: 4867 - RNA, 20 nt, Homo sapiens
  source 1..20: mol_type = genomic RNA
ttctatctgggctgttgcta

SEQ ID NO: 4868 - RNA, 20 nt, Homo sapiens
  source 1..20: mol_type = genomic RNA
tctatctgggctgttgctaa

SEQ ID NO: 4869 - RNA, 20 nt, Homo sapiens
  source 1..20: mol_type = genomic RNA
ctatctgggctgttgctaat

SEQ ID NO: 4870 - RNA, 20 nt, Homo sapiens
  source 1..20: mol_type = genomic RNA
tatctgggctgttgctaata

SEQ ID NO: 4871 - RNA, 20 nt, Homo sapiens
  source 1..20: mol_type = genomic RNA
atctgggctgttgctaatat

SEQ ID NO: 4872 - RNA, 20 nt, Homo sapiens
  source 1..20: mol_type = genomic RNA
tctgggctgttgctaatatt

SEQ ID NO: 4873 - RNA, 20 nt, Homo sapiens
  source 1..20: mol_type = genomic RNA
ctgggctgttgctaatattg

SEQ ID NO: 4874 - RNA, 20 nt, Homo sapiens
  source 1..20: mol_type = genomic RNA
tgggctgttgctaatattga

SEQ ID NO: 4875 - RNA, 20 nt, Homo sapiens
  source 1..20: mol_type = genomic RNA
gggctgttgctaatattgag

SEQ ID NO: 4876 - RNA, 20 nt, Homo sapiens
  source 1..20: mol_type = genomic RNA
ggctgttgctaatattgagg

SEQ ID NO: 4877 - RNA, 20 nt, Homo sapiens
  source 1..20: mol_type = genomic RNA
gctgttgctaatattgagga

SEQ ID NO: 4878 - RNA, 20 nt, Homo sapiens
  source 1..20: mol_type = genomic RNA
ctgttgctaatattgaggag

SEQ ID NO: 4879 - RNA, 20 nt, Homo sapiens
  source 1..20: mol_type = genomic RNA
tgttgctaatattgaggagg

SEQ ID NO: 4880 - RNA, 20 nt, Homo sapiens
  source 1..20: mol_type = genomic RNA
gttgctaatattgaggaggc

SEQ ID NO: 4881 - RNA, 20 nt, Homo sapiens
  source 1..20: mol_type = genomic RNA
ttgctaatattgaggaggct

SEQ ID NO: 4882 - RNA, 20 nt, Homo sapiens
  source 1..20: mol_type = genomic RNA
tgctaatattgaggaggctt

SEQ ID NO: 4883 - RNA, 20 nt, Homo sapiens
  source 1..20: mol_type = genomic RNA
gctaatattgaggaggcttg

SEQ ID NO: 4884 - RNA, 20 nt, Homo sapiens
  source 1..20: mol_type = genomic RNA
ctaatattgaggaggcttgc

SEQ ID NO: 4885 - RNA, 20 nt, Homo sapiens
  source 1..20: mol_type = genomic RNA
taatattgaggaggcttgcc

SEQ ID NO: 4886 - RNA, 20 nt, Homo sapiens
  source 1..20: mol_type = genomic RNA
aatattgaggaggcttgccc

SEQ ID NO: 4887 - RNA, 20 nt, Homo sapiens
  source 1..20: mol_type = genomic RNA
atattgaggaggcttgcccc

SEQ ID NO: 4888 - RNA, 20 nt, Homo sapiens
  source 1..20: mol_type = genomic RNA
tattgaggaggcttgcccca

SEQ ID NO: 4889 - RNA, 20 nt, Homo sapiens
  source 1..20: mol_type = genomic RNA
attgaggaggcttgccccac

SEQ ID NO: 4890 - RNA, 20 nt, Homo sapiens
  source 1..20: mol_type = genomic RNA
ttgaggaggcttgccccacc

SEQ ID NO: 4891 - RNA, 20 nt, Homo sapiens
  source 1..20: mol_type = genomic RNA
tgaggaggcttgccccaccc

SEQ ID NO: 4892 - RNA, 20 nt, Homo sapiens
  source 1..20: mol_type = genomic RNA
gaggaggcttgccccaccca

SEQ ID NO: 4893 - RNA, 20 nt, Homo sapiens
  source 1..20: mol_type = genomic RNA
aggaggcttgccccacccaa

SEQ ID NO: 4894 - RNA, 20 nt, Homo sapiens
  source 1..20: mol_type = genomic RNA
ggaggcttgccccacccaac

SEQ ID NO: 4895 - RNA, 20 nt, Homo sapiens
  source 1..20: mol_type = genomic RNA
gaggcttgccccacccaaca

SEQ ID NO: 4896 - RNA, 20 nt, Homo sapiens
  source 1..20: mol_type = genomic RNA
aggcttgccccacccaacaa

SEQ ID NO: 4897 - RNA, 20 nt, Homo sapiens
  source 1..20: mol_type = genomic RNA
ggcttgccccacccaacaag

SEQ ID NO: 4898 - RNA, 20 nt, Homo sapiens
  source 1..20: mol_type = genomic RNA
gcttgccccacccaacaagc

SEQ ID NO: 4899 - RNA, 20 nt, Homo sapiens
  source 1..20: mol_type = genomic RNA
cttgccccacccaacaagcc

SEQ ID NO: 4900 - RNA, 20 nt, Homo sapiens
  source 1..20: mol_type = genomic RNA
ttgccccacccaacaagcca

SEQ ID NO: 4901 - RNA, 20 nt, Homo sapiens
  source 1..20: mol_type = genomic RNA
tgccccacccaacaagccat

SEQ ID NO: 4902 - RNA, 20 nt, Homo sapiens
  source 1..20: mol_type = genomic RNA
gccccacccaacaagccata

SEQ ID NO: 4903 - RNA, 20 nt, Homo sapiens
  source 1..20: mol_type = genomic RNA
ccccacccaacaagccatag

SEQ ID NO: 4904 - RNA, 20 nt, Homo sapiens
  source 1..20: mol_type = genomic RNA
cccacccaacaagccatagt

SEQ ID NO: 4905 - RNA, 20 nt, Homo sapiens
  source 1..20: mol_type = genomic RNA
ccacccaacaagccatagtg

SEQ ID NO: 4906 - RNA, 20 nt, Homo sapiens
  source 1..20: mol_type = genomic RNA
cacccaacaagccatagtgg

SEQ ID NO: 4907 - RNA, 20 nt, Homo sapiens
  source 1..20: mol_type = genomic RNA
acccaacaagccatagtgga

SEQ ID NO: 4908 - RNA, 20 nt, Homo sapiens
  source 1..20: mol_type = genomic RNA
cccaacaagccatagtggag

SEQ ID NO: 4909 - RNA, 20 nt, Homo sapiens
  source 1..20: mol_type = genomic RNA
ccaacaagccatagtggaga

SEQ ID NO: 4910 - RNA, 20 nt, Homo sapiens
  source 1..20: mol_type = genomic RNA
caacaagccatagtggagag

SEQ ID NO: 4911 - RNA, 20 nt, Homo sapiens
  source 1..20: mol_type = genomic RNA
aacaagccatagtggagaga

SEQ ID NO: 4912 - RNA, 20 nt, Homo sapiens
  source 1..20: mol_type = genomic RNA
acaagccatagtggagagaa

SEQ ID NO: 4913 - RNA, 20 nt, Homo sapiens
  source 1..20: mol_type = genomic RNA
caagccatagtggagagaac

SEQ ID NO: 4914 - RNA, 20 nt, Homo sapiens
  source 1..20: mol_type = genomic RNA
aagccatagtggagagaact

SEQ ID NO: 4915 - RNA, 20 nt, Homo sapiens
  source 1..20: mol_type = genomic RNA
agccatagtggagagaactg

SEQ ID NO: 4916 - RNA, 20 nt, Homo sapiens
  source 1..20: mol_type = genomic RNA
gccatagtggagagaactga

SEQ ID NO: 4917 - RNA, 20 nt, Homo sapiens
  source 1..20: mol_type = genomic RNA
ccatagtggagagaactgaa

SEQ ID NO: 4918 - RNA, 20 nt, Homo sapiens
  source 1..20: mol_type = genomic RNA
catagtggagagaactgaat

SEQ ID NO: 4919 - RNA, 20 nt, Homo sapiens
  source 1..20: mol_type = genomic RNA
atagtggagagaactgaata

SEQ ID NO: 4920 - RNA, 20 nt, Homo sapiens
  source 1..20: mol_type = genomic RNA
tagtggagagaactgaataa

SEQ ID NO: 4921 - RNA, 20 nt, Homo sapiens
  source 1..20: mol_type = genomic RNA
agtggagagaactgaataaa

SEQ ID NO: 4922 - RNA, 20 nt, Homo sapiens
  source 1..20: mol_type = genomic RNA
gtggagagaactgaataaac

SEQ ID NO: 4923 - RNA, 20 nt, Homo sapiens
  source 1..20: mol_type = genomic RNA
tggagagaactgaataaaca

SEQ ID NO: 4924 - RNA, 20 nt, Homo sapiens
  source 1..20: mol_type = genomic RNA
ggagagaactgaataaacag

SEQ ID NO: 4925 - RNA, 20 nt, Homo sapiens
  source 1..20: mol_type = genomic RNA
gagagaactgaataaacagg

SEQ ID NO: 4926 - RNA, 20 nt, Homo sapiens
  source 1..20: mol_type = genomic RNA
agagaactgaataaacagga

SEQ ID NO: 4927 - RNA, 20 nt, Homo sapiens
  source 1..20: mol_type = genomic RNA
gagaactgaataaacaggaa

SEQ ID NO: 4928 - RNA, 20 nt, Homo sapiens
  source 1..20: mol_type = genomic RNA
agaactgaataaacaggaaa

SEQ ID NO: 4929 - RNA, 20 nt, Homo sapiens
  source 1..20: mol_type = genomic RNA
gaactgaataaacaggaaaa

SEQ ID NO: 4930 - RNA, 20 nt, Homo sapiens
  source 1..20: mol_type = genomic RNA
aactgaataaacaggaaaat

SEQ ID NO: 4931 - RNA, 20 nt, Homo sapiens
  source 1..20: mol_type = genomic RNA
actgaataaacaggaaaatg

SEQ ID NO: 4932 - RNA, 20 nt, Homo sapiens
  source 1..20: mol_type = genomic RNA
ctgaataaacaggaaaatgc

SEQ ID NO: 4933 - RNA, 20 nt, Homo sapiens
  source 1..20: mol_type = genomic RNA
tgaataaacaggaaaatgcc

SEQ ID NO: 4934 - RNA, 20 nt, Homo sapiens
  source 1..20: mol_type = genomic RNA
gaataaacaggaaaatgcca

SEQ ID NO: 4935 - RNA, 20 nt, Homo sapiens
  source 1..20: mol_type = genomic RNA
aataaacaggaaaatgccag

SEQ ID NO: 4936 - RNA, 20 nt, Homo sapiens
  source 1..20: mol_type = genomic RNA
ataaacaggaaaatgccaga

SEQ ID NO: 4937 - RNA, 20 nt, Homo sapiens
  source 1..20: mol_type = genomic RNA
taaacaggaaaatgccagag

SEQ ID NO: 4938 - RNA, 20 nt, Homo sapiens
  source 1..20: mol_type = genomic RNA
aaacaggaaaatgccagagc

SEQ ID NO: 4939 - RNA, 20 nt, Homo sapiens
  source 1..20: mol_type = genomic RNA
aacaggaaaatgccagagct

SEQ ID NO: 4940 - RNA, 20 nt, Homo sapiens
  source 1..20: mol_type = genomic RNA
acaggaaaatgccagagctt

SEQ ID NO: 4941 - RNA, 20 nt, Homo sapiens
  source 1..20: mol_type = genomic RNA
caggaaaatgccagagcttg

SEQ ID NO: 4942 - RNA, 20 nt, Homo sapiens
  source 1..20: mol_type = genomic RNA
aggaaaatgccagagcttgt

SEQ ID NO: 4943 - RNA, 20 nt, Homo sapiens
  source 1..20: mol_type = genomic RNA
ggaaaatgccagagcttgtg

SEQ ID NO: 4944 - RNA, 20 nt, Homo sapiens
  source 1..20: mol_type = genomic RNA
gaaaatgccagagcttgtga

SEQ ID NO: 4945 - RNA, 20 nt, Homo sapiens
  source 1..20: mol_type = genomic RNA
aaaatgccagagcttgtgaa

SEQ ID NO: 4946 - RNA, 20 nt, Homo sapiens
  source 1..20: mol_type = genomic RNA
aaatgccagagcttgtgaac

SEQ ID NO: 4947 - RNA, 20 nt, Homo sapiens
  source 1..20: mol_type = genomic RNA
aatgccagagcttgtgaacc

SEQ ID NO: 4948 - RNA, 20 nt, Homo sapiens
  source 1..20: mol_type = genomic RNA
atgccagagcttgtgaaccc

SEQ ID NO: 4949 - RNA, 20 nt, Homo sapiens
  source 1..20: mol_type = genomic RNA
tgccagagcttgtgaaccct

SEQ ID NO: 4950 - RNA, 20 nt, Homo sapiens
  source 1..20: mol_type = genomic RNA
gccagagcttgtgaaccctg

SEQ ID NO: 4951 - RNA, 20 nt, Homo sapiens
  source 1..20: mol_type = genomic RNA
ccagagcttgtgaaccctgt

SEQ ID NO: 4952 - RNA, 20 nt, Homo sapiens
  source 1..20: mol_type = genomic RNA
cagagcttgtgaaccctgtt

SEQ ID NO: 4953 - RNA, 20 nt, Homo sapiens
  source 1..20: mol_type = genomic RNA
agagcttgtgaaccctgttt

SEQ ID NO: 4954 - RNA, 20 nt, Homo sapiens
  source 1..20: mol_type = genomic RNA
gagcttgtgaaccctgtttc

SEQ ID NO: 4955 - RNA, 20 nt, Homo sapiens
  source 1..20: mol_type = genomic RNA
agcttgtgaaccctgtttct

SEQ ID NO: 4956 - RNA, 20 nt, Homo sapiens
  source 1..20: mol_type = genomic RNA
gcttgtgaaccctgtttctc

SEQ ID NO: 4957 - RNA, 20 nt, Homo sapiens
  source 1..20: mol_type = genomic RNA
cttgtgaaccctgtttctct

SEQ ID NO: 4958 - RNA, 20 nt, Homo sapiens
  source 1..20: mol_type = genomic RNA
ttgtgaaccctgtttctctt

SEQ ID NO: 4959 - RNA, 20 nt, Homo sapiens
  source 1..20: mol_type = genomic RNA
tgtgaaccctgtttctcttg

SEQ ID NO: 4960 - RNA, 20 nt, Homo sapiens
  source 1..20: mol_type = genomic RNA
gtgaaccctgtttctcttga

SEQ ID NO: 4961 - RNA, 20 nt, Homo sapiens
  source 1..20: mol_type = genomic RNA
tgaaccctgtttctcttgaa

SEQ ID NO: 4962 - RNA, 20 nt, Homo sapiens
  source 1..20: mol_type = genomic RNA
gaaccctgtttctcttgaag

SEQ ID NO: 4963 - RNA, 20 nt, Homo sapiens
  source 1..20: mol_type = genomic RNA
aaccctgtttctcttgaaga

SEQ ID NO: 4964 - RNA, 20 nt, Homo sapiens
  source 1..20: mol_type = genomic RNA
accctgtttctcttgaagaa

SEQ ID NO: 4965 - RNA, 20 nt, Homo sapiens
  source 1..20: mol_type = genomic RNA
ccctgtttctcttgaagaac

SEQ ID NO: 4966 - RNA, 20 nt, Homo sapiens
  source 1..20: mol_type = genomic RNA
cctgtttctcttgaagaact

SEQ ID NO: 4967 - RNA, 20 nt, Homo sapiens
  source 1..20: mol_type = genomic RNA
ctgtttctcttgaagaactg

SEQ ID NO: 4968 - RNA, 20 nt, Homo sapiens
  source 1..20: mol_type = genomic RNA
tgtttctcttgaagaactga

SEQ ID NO: 4969 - RNA, 20 nt, Homo sapiens
  source 1..20: mol_type = genomic RNA
gtttctcttgaagaactgac

SEQ ID NO: 4970 - RNA, 20 nt, Homo sapiens
  source 1..20: mol_type = genomic RNA
tttctcttgaagaactgact

SEQ ID NO: 4971 - RNA, 20 nt, Homo sapiens
  source 1..20: mol_type = genomic RNA
ttctcttgaagaactgacta

SEQ ID NO: 4972 - RNA, 20 nt, Homo sapiens
  source 1..20: mol_type = genomic RNA
tctcttgaagaactgactag

SEQ ID NO: 4973 - RNA, 20 nt, Homo sapiens
  source 1..20: mol_type = genomic RNA
ctcttgaagaactgactagt

SEQ ID NO: 4974 - RNA, 20 nt, Homo sapiens
  source 1..20: mol_type = genomic RNA
tcttgaagaactgactagtg

SEQ ID NO: 4975 - RNA, 20 nt, Homo sapiens
  source 1..20: mol_type = genomic RNA
cttgaagaactgactagtga

SEQ ID NO: 4976 - RNA, 20 nt, Homo sapiens
  source 1..20: mol_type = genomic RNA
ttgaagaactgactagtgag

SEQ ID NO: 4977 - RNA, 20 nt, Homo sapiens
  source 1..20: mol_type = genomic RNA
tgaagaactgactagtgaga

SEQ ID NO: 4978 - RNA, 20 nt, Homo sapiens
  source 1..20: mol_type = genomic RNA
gaagaactgactagtgagat

SEQ ID NO: 4979 - RNA, 20 nt, Homo sapiens
  source 1..20: mol_type = genomic RNA
aagaactgactagtgagatg

SEQ ID NO: 4980 - RNA, 20 nt, Homo sapiens
  source 1..20: mol_type = genomic RNA
agaactgactagtgagatgg

SEQ ID NO: 4981 - RNA, 20 nt, Homo sapiens
  source 1..20: mol_type = genomic RNA
gaactgactagtgagatggc

SEQ ID NO: 4982 - RNA, 20 nt, Homo sapiens
  source 1..20: mol_type = genomic RNA
aactgactagtgagatggcc

SEQ ID NO: 4983 - RNA, 20 nt, Homo sapiens
  source 1..20: mol_type = genomic RNA
actgactagtgagatggcct

SEQ ID NO: 4984 - RNA, 20 nt, Homo sapiens
  source 1..20: mol_type = genomic RNA
ctgactagtgagatggcctg

SEQ ID NO: 4985 - RNA, 20 nt, Homo sapiens
  source 1..20: mol_type = genomic RNA
tgactagtgagatggcctgg

SEQ ID NO: 4986 - RNA, 20 nt, Homo sapiens
  source 1..20: mol_type = genomic RNA
gactagtgagatggcctggg

SEQ ID NO: 4987 - RNA, 20 nt, Homo sapiens
  source 1..20: mol_type = genomic RNA
actagtgagatggcctgggg

SEQ ID NO: 4988 - RNA, 20 nt, Homo sapiens
  source 1..20: mol_type = genomic RNA
ctagtgagatggcctgggga

SEQ ID NO: 4989 - RNA, 20 nt, Homo sapiens
  source 1..20: mol_type = genomic RNA
tagtgagatggcctggggaa

SEQ ID NO: 4990 - RNA, 20 nt, Homo sapiens
  source 1..20: mol_type = genomic RNA
agtgagatggcctggggaag

SEQ ID NO: 4991 - RNA, 20 nt, Homo sapiens
  source 1..20: mol_type = genomic RNA
gtgagatggcctggggaagc

SEQ ID NO: 4992 - RNA, 20 nt, Homo sapiens
  source 1..20: mol_type = genomic RNA
tgagatggcctggggaagct

SEQ ID NO: 4993 - RNA, 20 nt, Homo sapiens
  source 1..20: mol_type = genomic RNA
gagatggcctggggaagctg

SEQ ID NO: 4994 - RNA, 20 nt, Homo sapiens
  source 1..20: mol_type = genomic RNA
agatggcctggggaagctgt

SEQ ID NO: 4995 - RNA, 20 nt, Homo sapiens
  source 1..20: mol_type = genomic RNA
gatggcctggggaagctgtg

SEQ ID NO: 4996 - RNA, 20 nt, Homo sapiens
  source 1..20: mol_type = genomic RNA
atggcctggggaagctgtga

SEQ ID NO: 4997 - RNA, 20 nt, Homo sapiens
  source 1..20: mol_type = genomic RNA
tggcctggggaagctgtgaa

SEQ ID NO: 4998 - RNA, 20 nt, Homo sapiens
  source 1..20: mol_type = genomic RNA
ggcctggggaagctgtgaaa

SEQ ID NO: 4999 - RNA, 20 nt, Homo sapiens
  source 1..20: mol_type = genomic RNA
gcctggggaagctgtgaaag

SEQ ID NO: 5000 - RNA, 20 nt, Homo sapiens
  source 1..20: mol_type = genomic RNA
cctggggaagctgtgaaaga

SEQ ID NO: 5001 - RNA, 20 nt, Homo sapiens
  source 1..20: mol_type = genomic RNA
ctggggaagctgtgaaagaa

SEQ ID NO: 5002 - RNA, 20 nt, Homo sapiens
  source 1..20: mol_type = genomic RNA
tggggaagctgtgaaagaac

SEQ ID NO: 5003 - RNA, 20 nt, Homo sapiens
  source 1..20: mol_type = genomic RNA
ggggaagctgtgaaagaacc

SEQ ID NO: 5004 - RNA, 20 nt, Homo sapiens
  source 1..20: mol_type = genomic RNA
gggaagctgtgaaagaacca

SEQ ID NO: 5005 - RNA, 20 nt, Homo sapiens
  source 1..20: mol_type = genomic RNA
ggaagctgtgaaagaaccaa

SEQ ID NO: 5006 - RNA, 20 nt, Homo sapiens
  source 1..20: mol_type = genomic RNA
gaagctgtgaaagaaccaaa

SEQ ID NO: 5007 - RNA, 20 nt, Homo sapiens
  source 1..20: mol_type = genomic RNA
aagctgtgaaagaaccaaaa

SEQ ID NO: 5008 - RNA, 20 nt, Homo sapiens
  source 1..20: mol_type = genomic RNA
agctgtgaaagaaccaaaag

SEQ ID NO: 5009 - RNA, 20 nt, Homo sapiens
  source 1..20: mol_type = genomic RNA
gctgtgaaagaaccaaaaga

SEQ ID NO: 5010 - RNA, 20 nt, Homo sapiens
  source 1..20: mol_type = genomic RNA
ctgtgaaagaaccaaaagag

SEQ ID NO: 5011 - RNA, 20 nt, Homo sapiens
  source 1..20: mol_type = genomic RNA
tgtgaaagaaccaaaagaga

SEQ ID NO: 5012 - RNA, 20 nt, Homo sapiens
  source 1..20: mol_type = genomic RNA
gtgaaagaaccaaaagagat

SEQ ID NO: 5013 - RNA, 20 nt, Homo sapiens
  source 1..20: mol_type = genomic RNA
tgaaagaaccaaaagagatc

SEQ ID NO: 5014 - RNA, 20 nt, Homo sapiens
  source 1..20: mol_type = genomic RNA
gaaagaaccaaaagagatca

SEQ ID NO: 5015 - RNA, 20 nt, Homo sapiens
  source 1..20: mol_type = genomic RNA
aaagaaccaaaagagatcac

SEQ ID NO: 5016 - RNA, 20 nt, Homo sapiens
  source 1..20: mol_type = genomic RNA
aagaaccaaaagagatcaca

SEQ ID NO: 5017 - RNA, 20 nt, Homo sapiens
  source 1..20: mol_type = genomic RNA
agaaccaaaagagatcacaa

SEQ ID NO: 5018 - RNA, 20 nt, Homo sapiens
  source 1..20: mol_type = genomic RNA
gaaccaaaagagatcacaat

SEQ ID NO: 5019 - RNA, 20 nt, Homo sapiens
  source 1..20: mol_type = genomic RNA
aaccaaaagagatcacaata

SEQ ID NO: 5020 - RNA, 20 nt, Homo sapiens
  source 1..20: mol_type = genomic RNA
accaaaagagatcacaatac

SEQ ID NO: 5021 - RNA, 20 nt, Homo sapiens
  source 1..20: mol_type = genomic RNA
ccaaaagagatcacaatact

SEQ ID NO: 5022 - RNA, 20 nt, Homo sapiens
  source 1..20: mol_type = genomic RNA
caaaagagatcacaatactc

SEQ ID NO: 5023 - RNA, 20 nt, Homo sapiens
  source 1..20: mol_type = genomic RNA
aaaagagatcacaatactca

SEQ ID NO: 5024 - RNA, 20 nt, Homo sapiens
  source 1..20: mol_type = genomic RNA
aaagagatcacaatactcaa

SEQ ID NO: 5025 - RNA, 20 nt, Homo sapiens
  source 1..20: mol_type = genomic RNA
aagagatcacaatactcaaa

SEQ ID NO: 5026 - RNA, 20 nt, Homo sapiens
  source 1..20: mol_type = genomic RNA
agagatcacaatactcaaaa

SEQ ID NO: 5027 - RNA, 20 nt, Homo sapiens
  source 1..20: mol_type = genomic RNA
gagatcacaatactcaaaag

SEQ ID NO: 5028 - RNA, 20 nt, Homo sapiens
  source 1..20: mol_type = genomic RNA
agatcacaatactcaaaaga

SEQ ID NO: 5029 - RNA, 20 nt, Homo sapiens
  source 1..20: mol_type = genomic RNA
gatcacaatactcaaaagag

SEQ ID NO: 5030 - RNA, 20 nt, Homo sapiens
  source 1..20: mol_type = genomic RNA
atcacaatactcaaaagaga

SEQ ID NO: 5031 - RNA, 20 nt, Homo sapiens
  source 1..20: mol_type = genomic RNA
tcacaatactcaaaagagag

SEQ ID NO: 5032 - RNA, 20 nt, Homo sapiens
  source 1..20: mol_type = genomic RNA
cacaatactcaaaagagaga

SEQ ID NO: 5033 - RNA, 20 nt, Homo sapiens
  source 1..20: mol_type = genomic RNA
acaatactcaaaagagagag

SEQ ID NO: 5034 - RNA, 20 nt, Homo sapiens
  source 1..20: mol_type = genomic RNA
caatactcaaaagagagaga

SEQ ID NO: 5035 - RNA, 20 nt, Homo sapiens
  source 1..20: mol_type = genomic RNA
aatactcaaaagagagagag

SEQ ID NO: 5036 - RNA, 20 nt, Homo sapiens
  source 1..20: mol_type = genomic RNA
atactcaaaagagagagaga

SEQ ID NO: 5037 - RNA, 20 nt, Homo sapiens
  source 1..20: mol_type = genomic RNA
tactcaaaagagagagagag

SEQ ID NO: 5038 - RNA, 20 nt, Homo sapiens
  source 1..20: mol_type = genomic RNA
actcaaaagagagagagaga

SEQ ID NO: 5039 - RNA, 20 nt, Homo sapiens
  source 1..20: mol_type = genomic RNA
ctcaaaagagagagagagag

SEQ ID NO: 5040 - RNA, 20 nt, Homo sapiens
  source 1..20: mol_type = genomic RNA
tcaaaagagagagagagaga

SEQ ID NO: 5041 - RNA, 20 nt, Homo sapiens
  source 1..20: mol_type = genomic RNA
caaaagagagagagagagaa

SEQ ID NO: 5042 - RNA, 20 nt, Homo sapiens
  source 1..20: mol_type = genomic RNA
aaaagagagagagagagaaa

SEQ ID NO: 5043 - RNA, 20 nt, Homo sapiens
  source 1..20: mol_type = genomic RNA
aaagagagagagagagaaaa

SEQ ID NO: 5044 - RNA, 20 nt, Homo sapiens
  source 1..20: mol_type = genomic RNA
aagagagagagagagaaaaa

SEQ ID NO: 5045 - RNA, 20 nt, Homo sapiens
  source 1..20: mol_type = genomic RNA
agagagagagagagaaaaaa

SEQ ID NO: 5046 - RNA, 20 nt, Homo sapiens
  source 1..20: mol_type = genomic RNA
gagagagagagagaaaaaag

SEQ ID NO: 5047 - RNA, 20 nt, Homo sapiens
  source 1..20: mol_type = genomic RNA
agagagagagagaaaaaaga

SEQ ID NO: 5048 - RNA, 20 nt, Homo sapiens
  source 1..20: mol_type = genomic RNA
gagagagagagaaaaaagag

SEQ ID NO: 5049 - RNA, 20 nt, Homo sapiens
  source 1..20: mol_type = genomic RNA
agagagagagaaaaaagaga

SEQ ID NO: 5050 - RNA, 20 nt, Homo sapiens
  source 1..20: mol_type = genomic RNA
gagagagagaaaaaagagag

SEQ ID NO: 5051 - RNA, 20 nt, Homo sapiens
  source 1..20: mol_type = genomic RNA
agagagagaaaaaagagaga

SEQ ID NO: 5052 - RNA, 20 nt, Homo sapiens
  source 1..20: mol_type = genomic RNA
gagagagaaaaaagagagat

SEQ ID NO: 5053 - RNA, 20 nt, Homo sapiens
  source 1..20: mol_type = genomic RNA
agagagaaaaaagagagatc

SEQ ID NO: 5054 - RNA, 20 nt, Homo sapiens
  source 1..20: mol_type = genomic RNA
gagagaaaaaagagagatct

SEQ ID NO: 5055 - RNA, 20 nt, Homo sapiens
  source 1..20: mol_type = genomic RNA
agagaaaaaagagagatctt

SEQ ID NO: 5056 - RNA, 20 nt, Homo sapiens
  source 1..20: mol_type = genomic RNA
gagaaaaaagagagatcttg

SEQ ID NO: 5057 - RNA, 20 nt, Homo sapiens
  source 1..20: mol_type = genomic RNA
agaaaaaagagagatcttga

SEQ ID NO: 5058 - RNA, 20 nt, Homo sapiens
  source 1..20: mol_type = genomic RNA
gaaaaaagagagatcttgat

SEQ ID NO: 5059 - RNA, 20 nt, Homo sapiens
  source 1..20: mol_type = genomic RNA
aaaaaagagagatcttgatc

SEQ ID NO: 5060 - RNA, 20 nt, Homo sapiens
  source 1..20: mol_type = genomic RNA
aaaaagagagatcttgatcc

SEQ ID NO: 5061 - RNA, 20 nt, Homo sapiens
  source 1..20: mol_type = genomic RNA
aaaagagagatcttgatcca

SEQ ID NO: 5062 - RNA, 20 nt, Homo sapiens
  source 1..20: mol_type = genomic RNA
aaagagagatcttgatccac

SEQ ID NO: 5063 - RNA, 20 nt, Homo sapiens
  source 1..20: mol_type = genomic RNA
aagagagatcttgatccaca

SEQ ID NO: 5064 - RNA, 20 nt, Homo sapiens
  source 1..20: mol_type = genomic RNA
agagagatcttgatccacag

SEQ ID NO: 5065 - RNA, 20 nt, Homo sapiens
  source 1..20: mol_type = genomic RNA
gagagatcttgatccacaga

SEQ ID NO: 5066 - RNA, 20 nt, Homo sapiens
  source 1..20: mol_type = genomic RNA
agagatcttgatccacagaa

SEQ ID NO: 5067 - RNA, 20 nt, Homo sapiens
  source 1..20: mol_type = genomic RNA
gagatcttgatccacagaaa

SEQ ID NO: 5068 - RNA, 20 nt, Homo sapiens
  source 1..20: mol_type = genomic RNA
agatcttgatccacagaaat

SEQ ID NO: 5069 - RNA, 20 nt, Homo sapiens
  source 1..20: mol_type = genomic RNA
gatcttgatccacagaaata

SEQ ID NO: 5070 - RNA, 20 nt, Homo sapiens
  source 1..20: mol_type = genomic RNA
atcttgatccacagaaatac

SEQ ID NO: 5071 - RNA, 20 nt, Homo sapiens
  source 1..20: mol_type = genomic RNA
tcttgatccacagaaataca

SEQ ID NO: 5072 - RNA, 20 nt, Homo sapiens
  source 1..20: mol_type = genomic RNA
cttgatccacagaaatacat

SEQ ID NO: 5073 - RNA, 20 nt, Homo sapiens
  source 1..20: mol_type = genomic RNA
ttgatccacagaaatacatg

SEQ ID NO: 5074 - RNA, 20 nt, Homo sapiens
  source 1..20: mol_type = genomic RNA
tgatccacagaaatacatga

SEQ ID NO: 5075 - RNA, 20 nt, Homo sapiens
  source 1..20: mol_type = genomic RNA
gatccacagaaatacatgaa

SEQ ID NO: 5076 - RNA, 20 nt, Homo sapiens
  source 1..20: mol_type = genomic RNA
atccacagaaatacatgaaa

SEQ ID NO: 5077 - RNA, 20 nt, Homo sapiens
  source 1..20: mol_type = genomic RNA
tccacagaaatacatgaaat

SEQ ID NO: 5078 - RNA, 20 nt, Homo sapiens
  source 1..20: mol_type = genomic RNA
ccacagaaatacatgaaatg

SEQ ID NO: 5079 - RNA, 20 nt, Homo sapiens
  source 1..20: mol_type = genomic RNA
cacagaaatacatgaaatgt

SEQ ID NO: 5080 - RNA, 20 nt, Homo sapiens
  source 1..20: mol_type = genomic RNA
acagaaatacatgaaatgtc

SEQ ID NO: 5081 - RNA, 20 nt, Homo sapiens
  source 1..20: mol_type = genomic RNA
cagaaatacatgaaatgtct

SEQ ID NO: 5082 - RNA, 20 nt, Homo sapiens
  source 1..20: mol_type = genomic RNA
agaaatacatgaaatgtctg

SEQ ID NO: 5083 - RNA, 20 nt, Homo sapiens
  source 1..20: mol_type = genomic RNA
gaaatacatgaaatgtctgg

SEQ ID NO: 5084 - RNA, 20 nt, Homo sapiens
  source 1..20: mol_type = genomic RNA
aaatacatgaaatgtctggt

SEQ ID NO: 5085 - RNA, 20 nt, Homo sapiens
  source 1..20: mol_type = genomic RNA
aatacatgaaatgtctggtc

SEQ ID NO: 5086 - RNA, 20 nt, Homo sapiens
  source 1..20: mol_type = genomic RNA
atacatgaaatgtctggtct

SEQ ID NO: 5087 - RNA, 20 nt, Homo sapiens
  source 1..20: mol_type = genomic RNA
tacatgaaatgtctggtctg

SEQ ID NO: 5088 - RNA, 20 nt, Homo sapiens
  source 1..20: mol_type = genomic RNA
acatgaaatgtctggtctgt

SEQ ID NO: 5089 - RNA, 20 nt, Homo sapiens
  source 1..20: mol_type = genomic RNA
catgaaatgtctggtctgtc

SEQ ID NO: 5090 - RNA, 20 nt, Homo sapiens
  source 1..20: mol_type = genomic RNA
atgaaatgtctggtctgtcc

SEQ ID NO: 5091 - RNA, 20 nt, Homo sapiens
  source 1..20: mol_type = genomic RNA
tgaaatgtctggtctgtcca

SEQ ID NO: 5092 - RNA, 20 nt, Homo sapiens
  source 1..20: mol_type = genomic RNA
gaaatgtctggtctgtccac

SEQ ID NO: 5093 - RNA, 20 nt, Homo sapiens
  source 1..20: mol_type = genomic RNA
aaatgtctggtctgtccacc

SEQ ID NO: 5094 - RNA, 20 nt, Homo sapiens
  source 1..20: mol_type = genomic RNA
aatgtctggtctgtccaccc

SEQ ID NO: 5095 - RNA, 20 nt, Homo sapiens
  source 1..20: mol_type = genomic RNA
atgtctggtctgtccacccc

SEQ ID NO: 5096 - RNA, 20 nt, Homo sapiens
  source 1..20: mol_type = genomic RNA
tgtctggtctgtccacccca

SEQ ID NO: 5097 - RNA, 20 nt, Homo sapiens
  source 1..20: mol_type = genomic RNA
gtctggtctgtccaccccat

SEQ ID NO: 5098 - RNA, 20 nt, Homo sapiens
  source 1..20: mol_type = genomic RNA
tctggtctgtccaccccatc

SEQ ID NO: 5099 - RNA, 20 nt, Homo sapiens
  source 1..20: mol_type = genomic RNA
ctggtctgtccaccccatca

SEQ ID NO: 5100 - RNA, 20 nt, Homo sapiens
  source 1..20: mol_type = genomic RNA
tggtctgtccaccccatcaa

SEQ ID NO: 5101 - RNA, 20 nt, Homo sapiens
  source 1..20: mol_type = genomic RNA
ggtctgtccaccccatcaac

SEQ ID NO: 5102 - RNA, 20 nt, Homo sapiens
  source 1..20: mol_type = genomic RNA
gtctgtccaccccatcaaca

SEQ ID NO: 5103 - RNA, 20 nt, Homo sapiens
  source 1..20: mol_type = genomic RNA
tctgtccaccccatcaacaa

SEQ ID NO: 5104 - RNA, 20 nt, Homo sapiens
  source 1..20: mol_type = genomic RNA
ctgtccaccccatcaacaag

SEQ ID NO: 5105 - RNA, 20 nt, Homo sapiens
  source 1..20: mol_type = genomic RNA
tgtccaccccatcaacaagt

SEQ ID NO: 5106 - RNA, 20 nt, Homo sapiens
  source 1..20: mol_type = genomic RNA
gtccaccccatcaacaagtc

SEQ ID NO: 5107 - RNA, 20 nt, Homo sapiens
  source 1..20: mol_type = genomic RNA
tccaccccatcaacaagtct

SEQ ID NO: 5108 - RNA, 20 nt, Homo sapiens
  source 1..20: mol_type = genomic RNA
ccaccccatcaacaagtctt

SEQ ID NO: 5109 - RNA, 20 nt, Homo sapiens
  source 1..20: mol_type = genomic RNA
caccccatcaacaagtcttg

SEQ ID NO: 5110 - RNA, 20 nt, Homo sapiens
  source 1..20: mol_type = genomic RNA
accccatcaacaagtcttga

SEQ ID NO: 5111 - RNA, 20 nt, Homo sapiens
  source 1..20: mol_type = genomic RNA
ccccatcaacaagtcttgaa

SEQ ID NO: 5112 - RNA, 20 nt, Homo sapiens
  source 1..20: mol_type = genomic RNA
cccatcaacaagtcttgaaa

SEQ ID NO: 5113 - RNA, 20 nt, Homo sapiens
  source 1..20: mol_type = genomic RNA
ccatcaacaagtcttgaaac

SEQ ID NO: 5114 - RNA, 20 nt, Homo sapiens
  source 1..20: mol_type = genomic RNA
catcaacaagtcttgaaaca

SEQ ID NO: 5115 - RNA, 20 nt, Homo sapiens
  source 1..20: mol_type = genomic RNA
atcaacaagtcttgaaacaa

SEQ ID NO: 5116 - RNA, 20 nt, Homo sapiens
  source 1..20: mol_type = genomic RNA
tcaacaagtcttgaaacaag

SEQ ID NO: 5117 - RNA, 20 nt, Homo sapiens
  source 1..20: mol_type = genomic RNA
caacaagtcttgaaacaagc

SEQ ID NO: 5118 - RNA, 20 nt, Homo sapiens
  source 1..20: mol_type = genomic RNA
aacaagtcttgaaacaagca

SEQ ID NO: 5119 - RNA, 20 nt, Homo sapiens
  source 1..20: mol_type = genomic RNA
acaagtcttgaaacaagcaa

SEQ ID NO: 5120 - RNA, 20 nt, Homo sapiens
  source 1..20: mol_type = genomic RNA
caagtcttgaaacaagcaac

SEQ ID NO: 5121 - RNA, 20 nt, Homo sapiens
  source 1..20: mol_type = genomic RNA
aagtcttgaaacaagcaaca

SEQ ID NO: 5122 - RNA, 20 nt, Homo sapiens
  source 1..20: mol_type = genomic RNA
agtcttgaaacaagcaacag

SEQ ID NO: 5123 - RNA, 20 nt, Homo sapiens
  source 1..20: mol_type = genomic RNA
gtcttgaaacaagcaacaga

SEQ ID NO: 5124 - RNA, 20 nt, Homo sapiens
  source 1..20: mol_type = genomic RNA
tcttgaaacaagcaacagat

SEQ ID NO: 5125 - RNA, 20 nt, Homo sapiens
  source 1..20: mol_type = genomic RNA
cttgaaacaagcaacagatg

SEQ ID NO: 5126 - RNA, 20 nt, Homo sapiens
  source 1..20: mol_type = genomic RNA
ttgaaacaagcaacagatgg

SEQ ID NO: 5127 - RNA, 20 nt, Homo sapiens
  source 1..20: mol_type = genomic RNA
tgaaacaagcaacagatgga

SEQ ID NO: 5128 - RNA, 20 nt, Homo sapiens
  source 1..20: mol_type = genomic RNA
gaaacaagcaacagatggat

SEQ ID NO: 5129 - RNA, 20 nt, Homo sapiens
  source 1..20: mol_type = genomic RNA
aaacaagcaacagatggata

SEQ ID NO: 5130 - RNA, 20 nt, Homo sapiens
  source 1..20: mol_type = genomic RNA
aacaagcaacagatggatag

SEQ ID NO: 5131 - RNA, 20 nt, Homo sapiens
  source 1..20: mol_type = genomic RNA
acaagcaacagatggatagt

SEQ ID NO: 5132 - RNA, 20 nt, Homo sapiens
  source 1..20: mol_type = genomic RNA
caagcaacagatggatagtc

SEQ ID NO: 5133 - RNA, 20 nt, Homo sapiens
  source 1..20: mol_type = genomic RNA
aagcaacagatggatagtct

SEQ ID NO: 5134 - RNA, 20 nt, Homo sapiens
  source 1..20: mol_type = genomic RNA
agcaacagatggatagtctg

SEQ ID NO: 5135 - RNA, 20 nt, Homo sapiens
  source 1..20: mol_type = genomic RNA
gcaacagatggatagtctgt

SEQ ID NO: 5136 - RNA, 20 nt, Homo sapiens
  source 1..20: mol_type = genomic RNA
caacagatggatagtctgtc

SEQ ID NO: 5137 - RNA, 20 nt, Homo sapiens
  source 1..20: mol_type = genomic RNA
aacagatggatagtctgtcc

SEQ ID NO: 5138 - RNA, 20 nt, Homo sapiens
  source 1..20: mol_type = genomic RNA
acagatggatagtctgtcca

SEQ ID NO: 5139 - RNA, 20 nt, Homo sapiens
  source 1..20: mol_type = genomic RNA
cagatggatagtctgtccaa

SEQ ID NO: 5140 - RNA, 20 nt, Homo sapiens
  source 1..20: mol_type = genomic RNA
agatggatagtctgtccaaa

SEQ ID NO: 5141 - RNA, 20 nt, Homo sapiens
  source 1..20: mol_type = genomic RNA
gatggatagtctgtccaaat

SEQ ID NO: 5142 - RNA, 20 nt, Homo sapiens
  source 1..20: mol_type = genomic RNA
atggatagtctgtccaaatg

SEQ ID NO: 5143 - RNA, 20 nt, Homo sapiens
  source 1..20: mol_type = genomic RNA
tggatagtctgtccaaatgg

SEQ ID NO: 5144 - RNA, 20 nt, Homo sapiens
  source 1..20: mol_type = genomic RNA
ggatagtctgtccaaatgga

SEQ ID NO: 5145 - RNA, 20 nt, Homo sapiens
  source 1..20: mol_type = genomic RNA
gatagtctgtccaaatggac

SEQ ID NO: 5146 - RNA, 20 nt, Homo sapiens
  source 1..20: mol_type = genomic RNA
atagtctgtccaaatggaca

SEQ ID NO: 5147 - RNA, 20 nt, Homo sapiens
  source 1..20: mol_type = genomic RNA
tagtctgtccaaatggacat

SEQ ID NO: 5148 - RNA, 20 nt, Homo sapiens
  source 1..20: mol_type = genomic RNA
agtctgtccaaatggacata

SEQ ID NO: 5149 - RNA, 20 nt, Homo sapiens
  source 1..20: mol_type = genomic RNA
gtctgtccaaatggacataa

SEQ ID NO: 5150 - RNA, 20 nt, Homo sapiens
  source 1..20: mol_type = genomic RNA
tctgtccaaatggacataag

SEQ ID NO: 5151 - RNA, 20 nt, Homo sapiens
  source 1..20: mol_type = genomic RNA
ctgtccaaatggacataaga

SEQ ID NO: 5152 - RNA, 20 nt, Homo sapiens
  source 1..20: mol_type = genomic RNA
tgtccaaatggacataagac

SEQ ID NO: 5153 - RNA, 20 nt, Homo sapiens
  source 1..20: mol_type = genomic RNA
gtccaaatggacataagaca

SEQ ID NO: 5154 - RNA, 20 nt, Homo sapiens
  source 1..20: mol_type = genomic RNA
tccaaatggacataagacag

SEQ ID NO: 5155 - RNA, 20 nt, Homo sapiens
  source 1..20: mol_type = genomic RNA
ccaaatggacataagacaga

SEQ ID NO: 5156 - RNA, 20 nt, Homo sapiens
  source 1..20: mol_type = genomic RNA
caaatggacataagacagac

SEQ ID NO: 5157 - RNA, 20 nt, Homo sapiens
  source 1..20: mol_type = genomic RNA
aaatggacataagacagaca

SEQ ID NO: 5158 - RNA, 20 nt, Homo sapiens
  source 1..20: mol_type = genomic RNA
aatggacataagacagacag

SEQ ID NO: 5159 - RNA, 20 nt, Homo sapiens
  source 1..20: mol_type = genomic RNA
atggacataagacagacagc

SEQ ID NO: 5160 - RNA, 20 nt, Homo sapiens
  source 1..20: mol_type = genomic RNA
tggacataagacagacagca

SEQ ID NO: 5161 - RNA, 20 nt, Homo sapiens
  source 1..20: mol_type = genomic RNA
ggacataagacagacagcag

SEQ ID NO: 5162 - RNA, 20 nt, Homo sapiens
  source 1..20: mol_type = genomic RNA
gacataagacagacagcagt

SEQ ID NO: 5163 - RNA, 20 nt, Homo sapiens
  source 1..20: mol_type = genomic RNA
acataagacagacagcagtt

SEQ ID NO: 5164 - RNA, 20 nt, Homo sapiens
  source 1..20: mol_type = genomic RNA
cataagacagacagcagttt

SEQ ID NO: 5165 - RNA, 20 nt, Homo sapiens
  source 1..20: mol_type = genomic RNA
ataagacagacagcagtttc

SEQ ID NO: 5166 - RNA, 20 nt, Homo sapiens
  source 1..20: mol_type = genomic RNA
taagacagacagcagtttcc

SEQ ID NO: 5167 - RNA, 20 nt, Homo sapiens
  source 1..20: mol_type = genomic RNA
aagacagacagcagtttccc

SEQ ID NO: 5168 - RNA, 20 nt, Homo sapiens
  source 1..20: mol_type = genomic RNA
agacagacagcagtttccct

SEQ ID NO: 5169 - RNA, 20 nt, Homo sapiens
  source 1..20: mol_type = genomic RNA
gacagacagcagtttccctg

SEQ ID NO: 5170 - RNA, 20 nt, Homo sapiens
  source 1..20: mol_type = genomic RNA
acagacagcagtttccctgg

SEQ ID NO: 5171 - RNA, 20 nt, Homo sapiens
  source 1..20: mol_type = genomic RNA
cagacagcagtttccctggt

SEQ ID NO: 5172 - RNA, 20 nt, Homo sapiens
  source 1..20: mol_type = genomic RNA
agacagcagtttccctggtg

SEQ ID NO: 5173 - RNA, 20 nt, Homo sapiens
  source 1..20: mol_type = genomic RNA
gacagcagtttccctggtgg

SEQ ID NO: 5174 - RNA, 20 nt, Homo sapiens
  source 1..20: mol_type = genomic RNA
acagcagtttccctggtggt

SEQ ID NO: 5175 - RNA, 20 nt, Homo sapiens
  source 1..20: mol_type = genomic RNA
cagcagtttccctggtggtc

SEQ ID NO: 5176 - RNA, 20 nt, Homo sapiens
  source 1..20: mol_type = genomic RNA
agcagtttccctggtggtca

SEQ ID NO: 5177 - RNA, 20 nt, Homo sapiens
  source 1..20: mol_type = genomic RNA
gcagtttccctggtggtcag

SEQ ID NO: 5178 - RNA, 20 nt, Homo sapiens
  source 1..20: mol_type = genomic RNA
cagtttccctggtggtcagg

SEQ ID NO: 5179 - RNA, 20 nt, Homo sapiens
  source 1..20: mol_type = genomic RNA
agtttccctggtggtcaggg

SEQ ID NO: 5180 - RNA, 20 nt, Homo sapiens
  source 1..20: mol_type = genomic RNA
gtttccctggtggtcaggga

SEQ ID NO: 5181 - RNA, 20 nt, Homo sapiens
  source 1..20: mol_type = genomic RNA
tttccctggtggtcagggag

SEQ ID NO: 5182 - RNA, 20 nt, Homo sapiens
  source 1..20: mol_type = genomic RNA
ttccctggtggtcagggagg

SEQ ID NO: 5183 - RNA, 20 nt, Homo sapiens
  source 1..20: mol_type = genomic RNA
tccctggtggtcagggaggg

SEQ ID NO: 5184 - RNA, 20 nt, Homo sapiens
  source 1..20: mol_type = genomic RNA
ccctggtggtcagggagggg

SEQ ID NO: 5185 - RNA, 20 nt, Homo sapiens
  source 1..20: mol_type = genomic RNA
cctggtggtcagggaggggt

SEQ ID NO: 5186 - RNA, 20 nt, Homo sapiens
  source 1..20: mol_type = genomic RNA
ctggtggtcagggaggggtt

SEQ ID NO: 5187 - RNA, 20 nt, Homo sapiens
  source 1..20: mol_type = genomic RNA
tggtggtcagggaggggttt

SEQ ID NO: 5188 - RNA, 20 nt, Homo sapiens
  source 1..20: mol_type = genomic RNA
ggtggtcagggaggggtttt

SEQ ID NO: 5189 - RNA, 20 nt, Homo sapiens
  source 1..20: mol_type = genomic RNA
gtggtcagggaggggttttg

SEQ ID NO: 5190 - RNA, 20 nt, Homo sapiens
  source 1..20: mol_type = genomic RNA
tggtcagggaggggttttgg

SEQ ID NO: 5191 - RNA, 20 nt, Homo sapiens
  source 1..20: mol_type = genomic RNA
ggtcagggaggggttttggt

SEQ ID NO: 5192 - RNA, 20 nt, Homo sapiens
  source 1..20: mol_type = genomic RNA
gtcagggaggggttttggtg

SEQ ID NO: 5193 - RNA, 20 nt, Homo sapiens
  source 1..20: mol_type = genomic RNA
tcagggaggggttttggtga

SEQ ID NO: 5194 - RNA, 20 nt, Homo sapiens
  source 1..20: mol_type = genomic RNA
cagggaggggttttggtgat

SEQ ID NO: 5195 - RNA, 20 nt, Homo sapiens
  source 1..20: mol_type = genomic RNA
agggaggggttttggtgata

SEQ ID NO: 5196 - RNA, 20 nt, Homo sapiens
  source 1..20: mol_type = genomic RNA
gggaggggttttggtgatac

SEQ ID NO: 5197 - RNA, 20 nt, Homo sapiens
  source 1..20: mol_type = genomic RNA
ggaggggttttggtgatacc

SEQ ID NO: 5198 - RNA, 20 nt, Homo sapiens
  source 1..20: mol_type = genomic RNA
gaggggttttggtgataccc

SEQ ID NO: 5199 - RNA, 20 nt, Homo sapiens
  source 1..20: mol_type = genomic RNA
aggggttttggtgataccca

SEQ ID NO: 5200 - RNA, 20 nt, Homo sapiens
  source 1..20: mol_type = genomic RNA
ggggttttggtgatacccaa

SEQ ID NO: 5201 - RNA, 20 nt, Homo sapiens
  source 1..20: mol_type = genomic RNA
gggttttggtgatacccaag

SEQ ID NO: 5202 - RNA, 20 nt, Homo sapiens
  source 1..20: mol_type = genomic RNA
ggttttggtgatacccaagt

SEQ ID NO: 5203 - RNA, 20 nt, Homo sapiens
  source 1..20: mol_type = genomic RNA
gttttggtgatacccaagtt

SEQ ID NO: 5204 - RNA, 20 nt, Homo sapiens
  source 1..20: mol_type = genomic RNA
ttttggtgatacccaagtta

SEQ ID NO: 5205 - RNA, 20 nt, Homo sapiens
  source 1..20: mol_type = genomic RNA
tttggtgatacccaagttat

SEQ ID NO: 5206 - RNA, 20 nt, Homo sapiens
  source 1..20: mol_type = genomic RNA
ttggtgatacccaagttatt

SEQ ID NO: 5207 - RNA, 20 nt, Homo sapiens
  source 1..20: mol_type = genomic RNA
tggtgatacccaagttattg

SEQ ID NO: 5208 - RNA, 20 nt, Homo sapiens
  source 1..20: mol_type = genomic RNA
ggtgatacccaagttattgg

SEQ ID NO: 5209 - RNA, 20 nt, Homo sapiens
  source 1..20: mol_type = genomic RNA
gtgatacccaagttattggg

SEQ ID NO: 5210 - RNA, 20 nt, Homo sapiens
  source 1..20: mol_type = genomic RNA
tgatacccaagttattggga

SEQ ID NO: 5211 - RNA, 20 nt, Homo sapiens
  source 1..20: mol_type = genomic RNA
gatacccaagttattgggat

SEQ ID NO: 5212 - RNA, 20 nt, Homo sapiens
  source 1..20: mol_type = genomic RNA
atacccaagttattgggatg

SEQ ID NO: 5213 - RNA, 20 nt, Homo sapiens
  source 1..20: mol_type = genomic RNA
tacccaagttattgggatgt

SEQ ID NO: 5214 - RNA, 20 nt, Homo sapiens
  source 1..20: mol_type = genomic RNA
acccaagttattgggatgtc

SEQ ID NO: 5215 - RNA, 20 nt, Homo sapiens
  source 1..20: mol_type = genomic RNA
cccaagttattgggatgtca

SEQ ID NO: 5216 - RNA, 20 nt, Homo sapiens
  source 1..20: mol_type = genomic RNA
ccaagttattgggatgtcat

SEQ ID NO: 5217 - RNA, 20 nt, Homo sapiens
  source 1..20: mol_type = genomic RNA
caagttattgggatgtcatc

SEQ ID NO: 5218 - RNA, 20 nt, Homo sapiens
  source 1..20: mol_type = genomic RNA
aagttattgggatgtcatct

SEQ ID NO: 5219 - RNA, 20 nt, Homo sapiens
  source 1..20: mol_type = genomic RNA
agttattgggatgtcatctt

SEQ ID NO: 5220 - RNA, 20 nt, Homo sapiens
  source 1..20: mol_type = genomic RNA
gttattgggatgtcatcttc

SEQ ID NO: 5221 - RNA, 20 nt, Homo sapiens
  source 1..20: mol_type = genomic RNA
ttattgggatgtcatcttcc

SEQ ID NO: 5222 - RNA, 20 nt, Homo sapiens
  source 1..20: mol_type = genomic RNA
tattgggatgtcatcttcct

SEQ ID NO: 5223 - RNA, 20 nt, Homo sapiens
  source 1..20: mol_type = genomic RNA
attgggatgtcatcttcctg

SEQ ID NO: 5224 - RNA, 20 nt, Homo sapiens
  source 1..20: mol_type = genomic RNA
ttgggatgtcatcttcctgg

SEQ ID NO: 5225 - RNA, 20 nt, Homo sapiens
  source 1..20: mol_type = genomic RNA
tgggatgtcatcttcctgga

SEQ ID NO: 5226 - RNA, 20 nt, Homo sapiens
  source 1..20: mol_type = genomic RNA
gggatgtcatcttcctggaa

SEQ ID NO: 5227 - RNA, 20 nt, Homo sapiens
  source 1..20: mol_type = genomic RNA
ggatgtcatcttcctggaag

SEQ ID NO: 5228 - RNA, 20 nt, Homo sapiens
  source 1..20: mol_type = genomic RNA
gatgtcatcttcctggaagc

SEQ ID NO: 5229 - RNA, 20 nt, Homo sapiens
  source 1..20: mol_type = genomic RNA
atgtcatcttcctggaagca

SEQ ID NO: 5230 - RNA, 20 nt, Homo sapiens
  source 1..20: mol_type = genomic RNA
tgtcatcttcctggaagcag

SEQ ID NO: 5231 - RNA, 20 nt, Homo sapiens
  source 1..20: mol_type = genomic RNA
gtcatcttcctggaagcaga

SEQ ID NO: 5232 - RNA, 20 nt, Homo sapiens
  source 1..20: mol_type = genomic RNA
tcatcttcctggaagcagag

SEQ ID NO: 5233 - RNA, 20 nt, Homo sapiens
  source 1..20: mol_type = genomic RNA
catcttcctggaagcagagc

SEQ ID NO: 5234 - RNA, 20 nt, Homo sapiens
  source 1..20: mol_type = genomic RNA
atcttcctggaagcagagct

SEQ ID NO: 5235 - RNA, 20 nt, Homo sapiens
  source 1..20: mol_type = genomic RNA
tcttcctggaagcagagctg

SEQ ID NO: 5236 - RNA, 20 nt, Homo sapiens
  source 1..20: mol_type = genomic RNA
cttcctggaagcagagctgg

SEQ ID NO: 5237 - RNA, 20 nt, Homo sapiens
  source 1..20: mol_type = genomic RNA
ttcctggaagcagagctggg

SEQ ID NO: 5238 - RNA, 20 nt, Homo sapiens
  source 1..20: mol_type = genomic RNA
tcctggaagcagagctgggg

SEQ ID NO: 5239 - RNA, 20 nt, Homo sapiens
  source 1..20: mol_type = genomic RNA
cctggaagcagagctgggga

SEQ ID NO: 5240 - RNA, 20 nt, Homo sapiens
  source 1..20: mol_type = genomic RNA
ctggaagcagagctggggag

SEQ ID NO: 5241 - RNA, 20 nt, Homo sapiens
  source 1..20: mol_type = genomic RNA
tggaagcagagctggggagg

SEQ ID NO: 5242 - RNA, 20 nt, Homo sapiens
  source 1..20: mol_type = genomic RNA
ggaagcagagctggggaggg

SEQ ID NO: 5243 - RNA, 20 nt, Homo sapiens
  source 1..20: mol_type = genomic RNA
gaagcagagctggggaggga

SEQ ID NO: 5244 - RNA, 20 nt, Homo sapiens
  source 1..20: mol_type = genomic RNA
aagcagagctggggagggag

SEQ ID NO: 5245 - RNA, 20 nt, Homo sapiens
  source 1..20: mol_type = genomic RNA
agcagagctggggagggaga

SEQ ID NO: 5246 - RNA, 20 nt, Homo sapiens
  source 1..20: mol_type = genomic RNA
gcagagctggggagggagag

SEQ ID NO: 5247 - RNA, 20 nt, Homo sapiens
  source 1..20: mol_type = genomic RNA
cagagctggggagggagagc

SEQ ID NO: 5248 - RNA, 20 nt, Homo sapiens
  source 1..20: mol_type = genomic RNA
agagctggggagggagagcc

SEQ ID NO: 5249 - RNA, 20 nt, Homo sapiens
  source 1..20: mol_type = genomic RNA
gagctggggagggagagcca

SEQ ID NO: 5250 - RNA, 20 nt, Homo sapiens
  source 1..20: mol_type = genomic RNA
agctggggagggagagccat

SEQ ID NO: 5251 - RNA, 20 nt, Homo sapiens
  source 1..20: mol_type = genomic RNA
gctggggagggagagccatc

SEQ ID NO: 5252 - RNA, 20 nt, Homo sapiens
  source 1..20: mol_type = genomic RNA
ctggggagggagagccatca

SEQ ID NO: 5253 - RNA, 20 nt, Homo sapiens
  source 1..20: mol_type = genomic RNA
tggggagggagagccatcac

SEQ ID NO: 5254 - RNA, 20 nt, Homo sapiens
  source 1..20: mol_type = genomic RNA
ggggagggagagccatcacc

SEQ ID NO: 5255 - RNA, 20 nt, Homo sapiens
  source 1..20: mol_type = genomic RNA
gggagggagagccatcacct

SEQ ID NO: 5256 - RNA, 20 nt, Homo sapiens
  source 1..20: mol_type = genomic RNA
ggagggagagccatcacctt

SEQ ID NO: 5257 - RNA, 20 nt, Homo sapiens
  source 1..20: mol_type = genomic RNA
gagggagagccatcaccttg

SEQ ID NO: 5258 - RNA, 20 nt, Homo sapiens
  source 1..20: mol_type = genomic RNA
agggagagccatcaccttga

SEQ ID NO: 5259 - RNA, 20 nt, Homo sapiens
  source 1..20: mol_type = genomic RNA
gggagagccatcaccttgat

SEQ ID NO: 5260 - RNA, 20 nt, Homo sapiens
  source 1..20: mol_type = genomic RNA
ggagagccatcaccttgata

SEQ ID NO: 5261 - RNA, 20 nt, Homo sapiens
  source 1..20: mol_type = genomic RNA
gagagccatcaccttgataa

SEQ ID NO: 5262 - RNA, 20 nt, Homo sapiens
  source 1..20: mol_type = genomic RNA
agagccatcaccttgataat

SEQ ID NO: 5263 - RNA, 20 nt, Homo sapiens
  source 1..20: mol_type = genomic RNA
gagccatcaccttgataatg

SEQ ID NO: 5264 - RNA, 20 nt, Homo sapiens
  source 1..20: mol_type = genomic RNA
agccatcaccttgataatgg

SEQ ID NO: 5265 - RNA, 20 nt, Homo sapiens
  source 1..20: mol_type = genomic RNA
gccatcaccttgataatggg

SEQ ID NO: 5266 - RNA, 20 nt, Homo sapiens
  source 1..20: mol_type = genomic RNA
ccatcaccttgataatggga

SEQ ID NO: 5267 - RNA, 20 nt, Homo sapiens
  source 1..20: mol_type = genomic RNA
catcaccttgataatgggat

SEQ ID NO: 5268 - RNA, 20 nt, Homo sapiens
  source 1..20: mol_type = genomic RNA
atcaccttgataatgggatg

SEQ ID NO: 5269 - RNA, 20 nt, Homo sapiens
  source 1..20: mol_type = genomic RNA
tcaccttgataatgggatga

SEQ ID NO: 5270 - RNA, 20 nt, Homo sapiens
  source 1..20: mol_type = genomic RNA
caccttgataatgggatgaa

SEQ ID NO: 5271 - RNA, 20 nt, Homo sapiens
  source 1..20: mol_type = genomic RNA
accttgataatgggatgaat

SEQ ID NO: 5272 - RNA, 20 nt, Homo sapiens
  source 1..20: mol_type = genomic RNA
ccttgataatgggatgaatg

SEQ ID NO: 5273 - RNA, 20 nt, Homo sapiens
  source 1..20: mol_type = genomic RNA
cttgataatgggatgaatgg

SEQ ID NO: 5274 - RNA, 20 nt, Homo sapiens
  source 1..20: mol_type = genomic RNA
ttgataatgggatgaatgga

SEQ ID NO: 5275 - RNA, 20 nt, Homo sapiens
  source 1..20: mol_type = genomic RNA
tgataatgggatgaatggaa

SEQ ID NO: 5276 - RNA, 20 nt, Homo sapiens
  source 1..20: mol_type = genomic RNA
gataatgggatgaatggaag

SEQ ID NO: 5277 - RNA, 20 nt, Homo sapiens
  source 1..20: mol_type = genomic RNA
ataatgggatgaatggaagg

SEQ ID NO: 5278 - RNA, 20 nt, Homo sapiens
  source 1..20: mol_type = genomic RNA
taatgggatgaatggaagga

SEQ ID NO: 5279 - RNA, 20 nt, Homo sapiens
  source 1..20: mol_type = genomic RNA
aatgggatgaatggaaggag

SEQ ID NO: 5280 - RNA, 20 nt, Homo sapiens
  source 1..20: mol_type = genomic RNA
atgggatgaatggaaggagg

SEQ ID NO: 5281 - RNA, 20 nt, Homo sapiens
  source 1..20: mol_type = genomic RNA
tgggatgaatggaaggaggc

SEQ ID NO: 5282 - RNA, 20 nt, Homo sapiens
  source 1..20: mol_type = genomic RNA
gggatgaatggaaggaggct

SEQ ID NO: 5283 - RNA, 20 nt, Homo sapiens
  source 1..20: mol_type = genomic RNA
ggatgaatggaaggaggctt

SEQ ID NO: 5284 - RNA, 20 nt, Homo sapiens
  source 1..20: mol_type = genomic RNA
gatgaatggaaggaggctta

SEQ ID NO: 5285 - RNA, 20 nt, Homo sapiens
  source 1..20: mol_type = genomic RNA
atgaatggaaggaggcttag

SEQ ID NO: 5286 - RNA, 20 nt, Homo sapiens
  source 1..20: mol_type = genomic RNA
tgaatggaaggaggcttagg

SEQ ID NO: 5287 - RNA, 20 nt, Homo sapiens
  source 1..20: mol_type = genomic RNA
gaatggaaggaggcttagga

SEQ ID NO: 5288 - RNA, 20 nt, Homo sapiens
  source 1..20: mol_type = genomic RNA
aatggaaggaggcttaggac

SEQ ID NO: 5289 - RNA, 20 nt, Homo sapiens
  source 1..20: mol_type = genomic RNA
atggaaggaggcttaggact

SEQ ID NO: 5290 - RNA, 20 nt, Homo sapiens
  source 1..20: mol_type = genomic RNA
tggaaggaggcttaggactt

SEQ ID NO: 5291 - RNA, 20 nt, Homo sapiens
  source 1..20: mol_type = genomic RNA
ggaaggaggcttaggacttt

SEQ ID NO: 5292 - RNA, 20 nt, Homo sapiens
  source 1..20: mol_type = genomic RNA
gaaggaggcttaggactttc

SEQ ID NO: 5293 - RNA, 20 nt, Homo sapiens
  source 1..20: mol_type = genomic RNA
aaggaggcttaggactttcc

SEQ ID NO: 5294 - RNA, 20 nt, Homo sapiens
  source 1..20: mol_type = genomic RNA
aggaggcttaggactttcca

SEQ ID NO: 5295 - RNA, 20 nt, Homo sapiens
  source 1..20: mol_type = genomic RNA
ggaggcttaggactttccac

SEQ ID NO: 5296 - RNA, 20 nt, Homo sapiens
  source 1..20: mol_type = genomic RNA
gaggcttaggactttccact

SEQ ID NO: 5297 - RNA, 20 nt, Homo sapiens
  source 1..20: mol_type = genomic RNA
aggcttaggactttccactc

SEQ ID NO: 5298 - RNA, 20 nt, Homo sapiens
  source 1..20: mol_type = genomic RNA
ggcttaggactttccactcc

SEQ ID NO: 5299 - RNA, 20 nt, Homo sapiens
  source 1..20: mol_type = genomic RNA
gcttaggactttccactcct

SEQ ID NO: 5300 - RNA, 20 nt, Homo sapiens
  source 1..20: mol_type = genomic RNA
cttaggactttccactcctg

SEQ ID NO: 5301 - RNA, 20 nt, Homo sapiens
  source 1..20: mol_type = genomic RNA
ttaggactttccactcctgg

SEQ ID NO: 5302 - RNA, 20 nt, Homo sapiens
  source 1..20: mol_type = genomic RNA
taggactttccactcctggc

SEQ ID NO: 5303 - RNA, 20 nt, Homo sapiens
  source 1..20: mol_type = genomic RNA
aggactttccactcctggct

SEQ ID NO: 5304 - RNA, 20 nt, Homo sapiens
  source 1..20: mol_type = genomic RNA
ggactttccactcctggctg

SEQ ID NO: 5305 - RNA, 20 nt, Homo sapiens
  source 1..20: mol_type = genomic RNA
gactttccactcctggctga

SEQ ID NO: 5306 - RNA, 20 nt, Homo sapiens
  source 1..20: mol_type = genomic RNA
actttccactcctggctgag

SEQ ID NO: 5307 - RNA, 20 nt, Homo sapiens
  source 1..20: mol_type = genomic RNA
ctttccactcctggctgaga

SEQ ID NO: 5308 - RNA, 20 nt, Homo sapiens
  source 1..20: mol_type = genomic RNA
tttccactcctggctgagag

SEQ ID NO: 5309 - RNA, 20 nt, Homo sapiens
  source 1..20: mol_type = genomic RNA
ttccactcctggctgagaga

SEQ ID NO: 5310 - RNA, 20 nt, Homo sapiens
  source 1..20: mol_type = genomic RNA
tccactcctggctgagagag

SEQ ID NO: 5311 - RNA, 20 nt, Homo sapiens
  source 1..20: mol_type = genomic RNA
ccactcctggctgagagagg

SEQ ID NO: 5312 - RNA, 20 nt, Homo sapiens
  source 1..20: mol_type = genomic RNA
cactcctggctgagagagga

SEQ ID NO: 5313 - RNA, 20 nt, Homo sapiens
  source 1..20: mol_type = genomic RNA
actcctggctgagagaggaa

SEQ ID NO: 5314 - RNA, 20 nt, Homo sapiens
  source 1..20: mol_type = genomic RNA
ctcctggctgagagaggaag

SEQ ID NO: 5315 - RNA, 20 nt, Homo sapiens
  source 1..20: mol_type = genomic RNA
tcctggctgagagaggaaga

SEQ ID NO: 5316 - RNA, 20 nt, Homo sapiens
  source 1..20: mol_type = genomic RNA
cctggctgagagaggaagag

SEQ ID NO: 5317 - RNA, 20 nt, Homo sapiens
  source 1..20: mol_type = genomic RNA
ctggctgagagaggaagagc

SEQ ID NO: 5318 - RNA, 20 nt, Homo sapiens
  source 1..20: mol_type = genomic RNA
tggctgagagaggaagagct

SEQ ID NO: 5319 - RNA, 20 nt, Homo sapiens
  source 1..20: mol_type = genomic RNA
ggctgagagaggaagagctg

SEQ ID NO: 5320 - RNA, 20 nt, Homo sapiens
  source 1..20: mol_type = genomic RNA
gctgagagaggaagagctgc

SEQ ID NO: 5321 - RNA, 20 nt, Homo sapiens
  source 1..20: mol_type = genomic RNA
ctgagagaggaagagctgca

SEQ ID NO: 5322 - RNA, 20 nt, Homo sapiens
  source 1..20: mol_type = genomic RNA
tgagagaggaagagctgcaa

SEQ ID NO: 5323 - RNA, 20 nt, Homo sapiens
  source 1..20: mol_type = genomic RNA
gagagaggaagagctgcaac

SEQ ID NO: 5324 - RNA, 20 nt, Homo sapiens
  source 1..20: mol_type = genomic RNA
agagaggaagagctgcaacg

SEQ ID NO: 5325 - RNA, 20 nt, Homo sapiens
  source 1..20: mol_type = genomic RNA
gagaggaagagctgcaacgg

SEQ ID NO: 5326 - RNA, 20 nt, Homo sapiens
  source 1..20: mol_type = genomic RNA
agaggaagagctgcaacgga

SEQ ID NO: 5327 - RNA, 20 nt, Homo sapiens
  source 1..20: mol_type = genomic RNA
gaggaagagctgcaacggaa

SEQ ID NO: 5328 - RNA, 20 nt, Homo sapiens
  source 1..20: mol_type = genomic RNA
aggaagagctgcaacggaat

SEQ ID NO: 5329 - RNA, 20 nt, Homo sapiens
  source 1..20: mol_type = genomic RNA
ggaagagctgcaacggaatt

SEQ ID NO: 5330 - RNA, 20 nt, Homo sapiens
  source 1..20: mol_type = genomic RNA
gaagagctgcaacggaatta

SEQ ID NO: 5331 - RNA, 20 nt, Homo sapiens
  source 1..20: mol_type = genomic RNA
aagagctgcaacggaattag

SEQ ID NO: 5332 - RNA, 20 nt, Homo sapiens
  source 1..20: mol_type = genomic RNA
agagctgcaacggaattagg

SEQ ID NO: 5333 - RNA, 20 nt, Homo sapiens
  source 1..20: mol_type = genomic RNA
gagctgcaacggaattagga

SEQ ID NO: 5334 - RNA, 20 nt, Homo sapiens
  source 1..20: mol_type = genomic RNA
agctgcaacggaattaggaa

SEQ ID NO: 5335 - RNA, 20 nt, Homo sapiens
  source 1..20: mol_type = genomic RNA
gctgcaacggaattaggaag

SEQ ID NO: 5336 - RNA, 20 nt, Homo sapiens
  source 1..20: mol_type = genomic RNA
ctgcaacggaattaggaaga

SEQ ID NO: 5337 - RNA, 20 nt, Homo sapiens
  source 1..20: mol_type = genomic RNA
tgcaacggaattaggaagac

SEQ ID NO: 5338 - RNA, 20 nt, Homo sapiens
  source 1..20: mol_type = genomic RNA
gcaacggaattaggaagacc

SEQ ID NO: 5339 - RNA, 20 nt, Homo sapiens
  source 1..20: mol_type = genomic RNA
caacggaattaggaagacca

SEQ ID NO: 5340 - RNA, 20 nt, Homo sapiens
  source 1..20: mol_type = genomic RNA
aacggaattaggaagaccaa

SEQ ID NO: 5341 - RNA, 20 nt, Homo sapiens
  source 1..20: mol_type = genomic RNA
acggaattaggaagaccaag

SEQ ID NO: 5342 - RNA, 20 nt, Homo sapiens
  source 1..20: mol_type = genomic RNA
cggaattaggaagaccaaga

SEQ ID NO: 5343 - RNA, 20 nt, Homo sapiens
  source 1..20: mol_type = genomic RNA
ggaattaggaagaccaagac

SEQ ID NO: 5344 - RNA, 20 nt, Homo sapiens
  source 1..20: mol_type = genomic RNA
gaattaggaagaccaagaca

SEQ ID NO: 5345 - RNA, 20 nt, Homo sapiens
  source 1..20: mol_type = genomic RNA
aattaggaagaccaagacac

SEQ ID NO: 5346 - RNA, 20 nt, Homo sapiens
  source 1..20: mol_type = genomic RNA
attaggaagaccaagacaca

SEQ ID NO: 5347 - RNA, 20 nt, Homo sapiens
  source 1..20: mol_type = genomic RNA
ttaggaagaccaagacacag

SEQ ID NO: 5348 - RNA, 20 nt, Homo sapiens
  source 1..20: mol_type = genomic RNA
taggaagaccaagacacaga

SEQ ID NO: 5349 - RNA, 20 nt, Homo sapiens
  source 1..20: mol_type = genomic RNA
aggaagaccaagacacagat

SEQ ID NO: 5350 - RNA, 20 nt, Homo sapiens
  source 1..20: mol_type = genomic RNA
ggaagaccaagacacagatc

SEQ ID NO: 5351 - RNA, 20 nt, Homo sapiens
  source 1..20: mol_type = genomic RNA
gaagaccaagacacagatca

SEQ ID NO: 5352 - RNA, 20 nt, Homo sapiens
  source 1..20: mol_type = genomic RNA
aagaccaagacacagatcac

SEQ ID NO: 5353 - RNA, 20 nt, Homo sapiens
  source 1..20: mol_type = genomic RNA
agaccaagacacagatcacc

SEQ ID NO: 5354 - RNA, 20 nt, Homo sapiens
  source 1..20: mol_type = genomic RNA
gaccaagacacagatcaccc

SEQ ID NO: 5355 - RNA, 20 nt, Homo sapiens
  source 1..20: mol_type = genomic RNA
accaagacacagatcacccg

SEQ ID NO: 5356 - RNA, 20 nt, Homo sapiens
  source 1..20: mol_type = genomic RNA
ccaagacacagatcacccgg

SEQ ID NO: 5357 - RNA, 20 nt, Homo sapiens
  source 1..20: mol_type = genomic RNA
caagacacagatcacccggg

SEQ ID NO: 5358 - RNA, 20 nt, Homo sapiens
  source 1..20: mol_type = genomic RNA
aagacacagatcacccgggg

SEQ ID NO: 5359 - RNA, 20 nt, Homo sapiens
  source 1..20: mol_type = genomic RNA
agacacagatcacccggggc

SEQ ID NO: 5360 - RNA, 20 nt, Homo sapiens
  source 1..20: mol_type = genomic RNA
gacacagatcacccggggct

SEQ ID NO: 5361 - RNA, 20 nt, Homo sapiens
  source 1..20: mol_type = genomic RNA
acacagatcacccggggctt

SEQ ID NO: 5362 - RNA, 20 nt, Homo sapiens
  source 1..20: mol_type = genomic RNA
cacagatcacccggggctta

SEQ ID NO: 5363 - RNA, 20 nt, Homo sapiens
  source 1..20: mol_type = genomic RNA
acagatcacccggggcttac

SEQ ID NO: 5364 - RNA, 20 nt, Homo sapiens
  source 1..20: mol_type = genomic RNA
cagatcacccggggcttact

SEQ ID NO: 5365 - RNA, 20 nt, Homo sapiens
  source 1..20: mol_type = genomic RNA
agatcacccggggcttactt

SEQ ID NO: 5366 - RNA, 20 nt, Homo sapiens
  source 1..20: mol_type = genomic RNA
gatcacccggggcttactta

SEQ ID NO: 5367 - RNA, 20 nt, Homo sapiens
  source 1..20: mol_type = genomic RNA
atcacccggggcttacttag

SEQ ID NO: 5368 - RNA, 20 nt, Homo sapiens
  source 1..20: mol_type = genomic RNA
tcacccggggcttacttagc

SEQ ID NO: 5369 - RNA, 20 nt, Homo sapiens
  source 1..20: mol_type = genomic RNA
cacccggggcttacttagcc

SEQ ID NO: 5370 - RNA, 20 nt, Homo sapiens
  source 1..20: mol_type = genomic RNA
acccggggcttacttagcct

SEQ ID NO: 5371 - RNA, 20 nt, Homo sapiens
  source 1..20: mol_type = genomic RNA
cccggggcttacttagccta

SEQ ID NO: 5372 - RNA, 20 nt, Homo sapiens
  source 1..20: mol_type = genomic RNA
ccggggcttacttagcctac

SEQ ID NO: 5373 - RNA, 20 nt, Homo sapiens
  source 1..20: mol_type = genomic RNA
cggggcttacttagcctaca

SEQ ID NO: 5374 - RNA, 20 nt, Homo sapiens
  source 1..20: mol_type = genomic RNA
ggggcttacttagcctacag

SEQ ID NO: 5375 - RNA, 20 nt, Homo sapiens
  source 1..20: mol_type = genomic RNA
gggcttacttagcctacaga

SEQ ID NO: 5376 - RNA, 20 nt, Homo sapiens
  source 1..20: mol_type = genomic RNA
ggcttacttagcctacagat

SEQ ID NO: 5377 - RNA, 20 nt, Homo sapiens
  source 1..20: mol_type = genomic RNA
gcttacttagcctacagatg

SEQ ID NO: 5378 - RNA, 20 nt, Homo sapiens
  source 1..20: mol_type = genomic RNA
cttacttagcctacagatgt

SEQ ID NO: 5379 - RNA, 20 nt, Homo sapiens
  source 1..20: mol_type = genomic RNA
ttacttagcctacagatgtc

SEQ ID NO: 5380 - RNA, 20 nt, Homo sapiens
  source 1..20: mol_type = genomic RNA
tacttagcctacagatgtcc

SEQ ID NO: 5381 - RNA, 20 nt, Homo sapiens
  source 1..20: mol_type = genomic RNA
acttagcctacagatgtcct

SEQ ID NO: 5382 - RNA, 20 nt, Homo sapiens
  source 1..20: mol_type = genomic RNA
cttagcctacagatgtccta

SEQ ID NO: 5383 - RNA, 20 nt, Homo sapiens
  source 1..20: mol_type = genomic RNA
ttagcctacagatgtcctac

SEQ ID NO: 5384 - RNA, 20 nt, Homo sapiens
  source 1..20: mol_type = genomic RNA
tagcctacagatgtcctacg

SEQ ID NO: 5385 - RNA, 20 nt, Homo sapiens
  source 1..20: mol_type = genomic RNA
agcctacagatgtcctacgg

SEQ ID NO: 5386 - RNA, 20 nt, Homo sapiens
  source 1..20: mol_type = genomic RNA
gcctacagatgtcctacggg

SEQ ID NO: 5387 - RNA, 20 nt, Homo sapiens
  source 1..20: mol_type = genomic RNA
cctacagatgtcctacggga

SEQ ID NO: 5388 - RNA, 20 nt, Homo sapiens
  source 1..20: mol_type = genomic RNA
ctacagatgtcctacgggaa

SEQ ID NO: 5389 - RNA, 20 nt, Homo sapiens
  source 1..20: mol_type = genomic RNA
tacagatgtcctacgggaac

SEQ ID NO: 5390 - RNA, 20 nt, Homo sapiens
  source 1..20: mol_type = genomic RNA
acagatgtcctacgggaacg

SEQ ID NO: 5391 - RNA, 20 nt, Homo sapiens
  source 1..20: mol_type = genomic RNA
cagatgtcctacgggaacgt

SEQ ID NO: 5392 - RNA, 20 nt, Homo sapiens
  source 1..20: mol_type = genomic RNA
agatgtcctacgggaacgtg

SEQ ID NO: 5393 - RNA, 20 nt, Homo sapiens
  source 1..20: mol_type = genomic RNA
gatgtcctacgggaacgtgg

SEQ ID NO: 5394 - RNA, 20 nt, Homo sapiens
  source 1..20: mol_type = genomic RNA
atgtcctacgggaacgtggg

SEQ ID NO: 5395 - RNA, 20 nt, Homo sapiens
  source 1..20: mol_type = genomic RNA
tgtcctacgggaacgtgggc

SEQ ID NO: 5396 - RNA, 20 nt, Homo sapiens
  source 1..20: mol_type = genomic RNA
gtcctacgggaacgtgggct

SEQ ID NO: 5397 - RNA, 20 nt, Homo sapiens
  source 1..20: mol_type = genomic RNA
tcctacgggaacgtgggctg

SEQ ID NO: 5398 - RNA, 20 nt, Homo sapiens
  source 1..20: mol_type = genomic RNA
cctacgggaacgtgggctgg

SEQ ID NO: 5399 - RNA, 20 nt, Homo sapiens
  source 1..20: mol_type = genomic RNA
ctacgggaacgtgggctggc

SEQ ID NO: 5400 - RNA, 20 nt, Homo sapiens
  source 1..20: mol_type = genomic RNA
tacgggaacgtgggctggcc

SEQ ID NO: 5401 - RNA, 20 nt, Homo sapiens
  source 1..20: mol_type = genomic RNA
acgggaacgtgggctggccc

SEQ ID NO: 5402 - RNA, 20 nt, Homo sapiens
  source 1..20: mol_type = genomic RNA
cgggaacgtgggctggccca

SEQ ID NO: 5403 - RNA, 20 nt, Homo sapiens
  source 1..20: mol_type = genomic RNA
gggaacgtgggctggcccag

SEQ ID NO: 5404 - RNA, 20 nt, Homo sapiens
  source 1..20: mol_type = genomic RNA
ggaacgtgggctggcccagc

SEQ ID NO: 5405 - RNA, 20 nt, Homo sapiens
  source 1..20: mol_type = genomic RNA
gaacgtgggctggcccagca

SEQ ID NO: 5406 - RNA, 20 nt, Homo sapiens
  source 1..20: mol_type = genomic RNA
aacgtgggctggcccagcat

SEQ ID NO: 5407 - RNA, 20 nt, Homo sapiens
  source 1..20: mol_type = genomic RNA
acgtgggctggcccagcata

SEQ ID NO: 5408 - RNA, 20 nt, Homo sapiens
  source 1..20: mol_type = genomic RNA
cgtgggctggcccagcatag

SEQ ID NO: 5409 - RNA, 20 nt, Homo sapiens
  source 1..20: mol_type = genomic RNA
gtgggctggcccagcatagg

SEQ ID NO: 5410 - RNA, 20 nt, Homo sapiens
  source 1..20: mol_type = genomic RNA
tgggctggcccagcataggg

SEQ ID NO: 5411 - RNA, 20 nt, Homo sapiens
  source 1..20: mol_type = genomic RNA
gggctggcccagcatagggc

SEQ ID NO: 5412 - RNA, 20 nt, Homo sapiens
  source 1..20: mol_type = genomic RNA
ggctggcccagcatagggct

SEQ ID NO: 5413 - RNA, 20 nt, Homo sapiens
  source 1..20: mol_type = genomic RNA
gctggcccagcatagggcta

SEQ ID NO: 5414 - RNA, 20 nt, Homo sapiens
  source 1..20: mol_type = genomic RNA
ctggcccagcatagggctag

SEQ ID NO: 5415 - RNA, 20 nt, Homo sapiens
  source 1..20: mol_type = genomic RNA
tggcccagcatagggctagc

SEQ ID NO: 5416 - RNA, 20 nt, Homo sapiens
  source 1..20: mol_type = genomic RNA
ggcccagcatagggctagca

SEQ ID NO: 5417 - RNA, 20 nt, Homo sapiens
  source 1..20: mol_type = genomic RNA
gcccagcatagggctagcaa

SEQ ID NO: 5418 - RNA, 20 nt, Homo sapiens
  source 1..20: mol_type = genomic RNA
cccagcatagggctagcaaa

SEQ ID NO: 5419 - RNA, 20 nt, Homo sapiens
  source 1..20: mol_type = genomic RNA
ccagcatagggctagcaaat

SEQ ID NO: 5420 - RNA, 20 nt, Homo sapiens
  source 1..20: mol_type = genomic RNA
cagcatagggctagcaaatt

SEQ ID NO: 5421 - RNA, 20 nt, Homo sapiens
  source 1..20: mol_type = genomic RNA
agcatagggctagcaaattt

SEQ ID NO: 5422 - RNA, 20 nt, Homo sapiens
  source 1..20: mol_type = genomic RNA
gcatagggctagcaaatttg

SEQ ID NO: 5423 - RNA, 20 nt, Homo sapiens
  source 1..20: mol_type = genomic RNA
catagggctagcaaatttga

SEQ ID NO: 5424 - RNA, 20 nt, Homo sapiens
  source 1..20: mol_type = genomic RNA
atagggctagcaaatttgag

SEQ ID NO: 5425 - RNA, 20 nt, Homo sapiens
  source 1..20: mol_type = genomic RNA
tagggctagcaaatttgagt

SEQ ID NO: 5426 - RNA, 20 nt, Homo sapiens
  source 1..20: mol_type = genomic RNA
agggctagcaaatttgagtt

SEQ ID NO: 5427 - RNA, 20 nt, Homo sapiens
  source 1..20: mol_type = genomic RNA
gggctagcaaatttgagttg

SEQ ID NO: 5428 - RNA, 20 nt, Homo sapiens
  source 1..20: mol_type = genomic RNA
ggctagcaaatttgagttgg

SEQ ID NO: 5429 - RNA, 20 nt, Homo sapiens
  source 1..20: mol_type = genomic RNA
gctagcaaatttgagttgga

SEQ ID NO: 5430 - RNA, 20 nt, Homo sapiens
  source 1..20: mol_type = genomic RNA
ctagcaaatttgagttggat

SEQ ID NO: 5431 - RNA, 20 nt, Homo sapiens
  source 1..20: mol_type = genomic RNA
tagcaaatttgagttggatg

SEQ ID NO: 5432 - RNA, 20 nt, Homo sapiens
  source 1..20: mol_type = genomic RNA
agcaaatttgagttggatga

SEQ ID NO: 5433 - RNA, 20 nt, Homo sapiens
  source 1..20: mol_type = genomic RNA
gcaaatttgagttggatgat

SEQ ID NO: 5434 - RNA, 20 nt, Homo sapiens
  source 1..20: mol_type = genomic RNA
caaatttgagttggatgatt

SEQ ID NO: 5435 - RNA, 20 nt, Homo sapiens
  source 1..20: mol_type = genomic RNA
aaatttgagttggatgattg

SEQ ID NO: 5436 - RNA, 20 nt, Homo sapiens
  source 1..20: mol_type = genomic RNA
aatttgagttggatgattgt

SEQ ID NO: 5437 - RNA, 20 nt, Homo sapiens
  source 1..20: mol_type = genomic RNA
atttgagttggatgattgtt

SEQ ID NO: 5438 - RNA, 20 nt, Homo sapiens
  source 1..20: mol_type = genomic RNA
tttgagttggatgattgttt

SEQ ID NO: 5439 - RNA, 20 nt, Homo sapiens
  source 1..20: mol_type = genomic RNA
ttgagttggatgattgtttt

SEQ ID NO: 5440 - RNA, 20 nt, Homo sapiens
  source 1..20: mol_type = genomic RNA
tgagttggatgattgttttt

SEQ ID NO: 5441 - RNA, 20 nt, Homo sapiens
  source 1..20: mol_type = genomic RNA
gagttggatgattgtttttg

SEQ ID NO: 5442 - RNA, 20 nt, Homo sapiens
  source 1..20: mol_type = genomic RNA
agttggatgattgtttttgc

SEQ ID NO: 5443 - RNA, 20 nt, Homo sapiens
  source 1..20: mol_type = genomic RNA
gttggatgattgtttttgct

SEQ ID NO: 5444 - RNA, 20 nt, Homo sapiens
  source 1..20: mol_type = genomic RNA
ttggatgattgtttttgctc

SEQ ID NO: 5445 - RNA, 20 nt, Homo sapiens
  source 1..20: mol_type = genomic RNA
tggatgattgtttttgctca

SEQ ID NO: 5446 - RNA, 20 nt, Homo sapiens
  source 1..20: mol_type = genomic RNA
ggatgattgtttttgctcaa

SEQ ID NO: 5447 - RNA, 20 nt, Homo sapiens
  source 1..20: mol_type = genomic RNA
gatgattgtttttgctcaag

SEQ ID NO: 5448 - RNA, 20 nt, Homo sapiens
  source 1..20: mol_type = genomic RNA
atgattgtttttgctcaagg

SEQ ID NO: 5449 - RNA, 20 nt, Homo sapiens
  source 1..20: mol_type = genomic RNA
tgattgtttttgctcaaggc

SEQ ID NO: 5450 - RNA, 20 nt, Homo sapiens
  source 1..20: mol_type = genomic RNA
gattgtttttgctcaaggca

SEQ ID NO: 5451 - RNA, 20 nt, Homo sapiens
  source 1..20: mol_type = genomic RNA
attgtttttgctcaaggcaa

SEQ ID NO: 5452 - RNA, 20 nt, Homo sapiens
  source 1..20: mol_type = genomic RNA
ttgtttttgctcaaggcaac

SEQ ID NO: 5453 - RNA, 20 nt, Homo sapiens
  source 1..20: mol_type = genomic RNA
tgtttttgctcaaggcaacc

SEQ ID NO: 5454 - RNA, 20 nt, Homo sapiens
  source 1..20: mol_type = genomic RNA
gtttttgctcaaggcaacca

SEQ ID NO: 5455 - RNA, 20 nt, Homo sapiens
  source 1..20: mol_type = genomic RNA
tttttgctcaaggcaaccag

SEQ ID NO: 5456 - RNA, 20 nt, Homo sapiens
  source 1..20: mol_type = genomic RNA
ttttgctcaaggcaaccaga

SEQ ID NO: 5457 - RNA, 20 nt, Homo sapiens
  source 1..20: mol_type = genomic RNA
tttgctcaaggcaaccagag

SEQ ID NO: 5458 - RNA, 20 nt, Homo sapiens
  source 1..20: mol_type = genomic RNA
ttgctcaaggcaaccagagg

SEQ ID NO: 5459 - RNA, 20 nt, Homo sapiens
  source 1..20: mol_type = genomic RNA
tgctcaaggcaaccagagga

SEQ ID NO: 5460 - RNA, 20 nt, Homo sapiens
  source 1..20: mol_type = genomic RNA
gctcaaggcaaccagaggaa

SEQ ID NO: 5461 - RNA, 20 nt, Homo sapiens
  source 1..20: mol_type = genomic RNA
ctcaaggcaaccagaggaaa

SEQ ID NO: 5462 - RNA, 20 nt, Homo sapiens
  source 1..20: mol_type = genomic RNA
tcaaggcaaccagaggaaac

SEQ ID NO: 5463 - RNA, 20 nt, Homo sapiens
  source 1..20: mol_type = genomic RNA
caaggcaaccagaggaaact

SEQ ID NO: 5464 - RNA, 20 nt, Homo sapiens
  source 1..20: mol_type = genomic RNA
aaggcaaccagaggaaactt

SEQ ID NO: 5465 - RNA, 20 nt, Homo sapiens
  source 1..20: mol_type = genomic RNA
aggcaaccagaggaaacttg

SEQ ID NO: 5466 - RNA, 20 nt, Homo sapiens
  source 1..20: mol_type = genomic RNA
ggcaaccagaggaaacttgc

SEQ ID NO: 5467 - RNA, 20 nt, Homo sapiens
  source 1..20: mol_type = genomic RNA
gcaaccagaggaaacttgca

SEQ ID NO: 5468 - RNA, 20 nt, Homo sapiens
  source 1..20: mol_type = genomic RNA
caaccagaggaaacttgcat

SEQ ID NO: 5469 - RNA, 20 nt, Homo sapiens
  source 1..20: mol_type = genomic RNA
aaccagaggaaacttgcata

SEQ ID NO: 5470 - RNA, 20 nt, Homo sapiens
  source 1..20: mol_type = genomic RNA
accagaggaaacttgcatac

SEQ ID NO: 5471 - RNA, 20 nt, Homo sapiens
  source 1..20: mol_type = genomic RNA
ccagaggaaacttgcataca

SEQ ID NO: 5472 - RNA, 20 nt, Homo sapiens
  source 1..20: mol_type = genomic RNA
cagaggaaacttgcatacag

SEQ ID NO: 5473 - RNA, 20 nt, Homo sapiens
  source 1..20: mol_type = genomic RNA
agaggaaacttgcatacaga

SEQ ID NO: 5474 - RNA, 20 nt, Homo sapiens
  source 1..20: mol_type = genomic RNA
gaggaaacttgcatacagag

SEQ ID NO: 5475 - RNA, 20 nt, Homo sapiens
  source 1..20: mol_type = genomic RNA
aggaaacttgcatacagaga

SEQ ID NO: 5476 - RNA, 20 nt, Homo sapiens
  source 1..20: mol_type = genomic RNA
ggaaacttgcatacagagac

SEQ ID NO: 5477 - RNA, 20 nt, Homo sapiens
  source 1..20: mol_type = genomic RNA
gaaacttgcatacagagaca

SEQ ID NO: 5478 - RNA, 20 nt, Homo sapiens
  source 1..20: mol_type = genomic RNA
aaacttgcatacagagacag

SEQ ID NO: 5479 - RNA, 20 nt, Homo sapiens
  source 1..20: mol_type = genomic RNA
aacttgcatacagagacaga

SEQ ID NO: 5480 - RNA, 20 nt, Homo sapiens
  source 1..20: mol_type = genomic RNA
acttgcatacagagacagat

SEQ ID NO: 5481 - RNA, 20 nt, Homo sapiens
  source 1..20: mol_type = genomic RNA
cttgcatacagagacagata

SEQ ID NO: 5482 - RNA, 20 nt, Homo sapiens
  source 1..20: mol_type = genomic RNA
ttgcatacagagacagatat

SEQ ID NO: 5483 - RNA, 20 nt, Homo sapiens
  source 1..20: mol_type = genomic RNA
tgcatacagagacagatata

SEQ ID NO: 5484 - RNA, 20 nt, Homo sapiens
  source 1..20: mol_type = genomic RNA
gcatacagagacagatatac

SEQ ID NO: 5485 - RNA, 20 nt, Homo sapiens
  source 1..20: mol_type = genomic RNA
catacagagacagatatact

SEQ ID NO: 5486 - RNA, 20 nt, Homo sapiens
  source 1..20: mol_type = genomic RNA
atacagagacagatatactg

SEQ ID NO: 5487 - RNA, 20 nt, Homo sapiens
  source 1..20: mol_type = genomic RNA
tacagagacagatatactgg

SEQ ID NO: 5488 - RNA, 20 nt, Homo sapiens
  source 1..20: mol_type = genomic RNA
acagagacagatatactggg

SEQ ID NO: 5489 - RNA, 20 nt, Homo sapiens
  source 1..20: mol_type = genomic RNA
cagagacagatatactggga

SEQ ID NO: 5490 - RNA, 20 nt, Homo sapiens
  source 1..20: mol_type = genomic RNA
agagacagatatactgggag

SEQ ID NO: 5491 - RNA, 20 nt, Homo sapiens
  source 1..20: mol_type = genomic RNA
gagacagatatactgggaga

SEQ ID NO: 5492 - RNA, 20 nt, Homo sapiens
  source 1..20: mol_type = genomic RNA
agacagatatactgggagaa

SEQ ID NO: 5493 - RNA, 20 nt, Homo sapiens
  source 1..20: mol_type = genomic RNA
gacagatatactgggagaaa

SEQ ID NO: 5494 - RNA, 20 nt, Homo sapiens
  source 1..20: mol_type = genomic RNA
acagatatactgggagaaat

SEQ ID NO: 5495 - RNA, 20 nt, Homo sapiens
  source 1..20: mol_type = genomic RNA
cagatatactgggagaaatg

SEQ ID NO: 5496 - RNA, 20 nt, Homo sapiens
  source 1..20: mol_type = genomic RNA
agatatactgggagaaatga

SEQ ID NO: 5497 - RNA, 20 nt, Homo sapiens
  source 1..20: mol_type = genomic RNA
gatatactgggagaaatgac

SEQ ID NO: 5498 - RNA, 20 nt, Homo sapiens
  source 1..20: mol_type = genomic RNA
atatactgggagaaatgact

SEQ ID NO: 5499 - RNA, 20 nt, Homo sapiens
  source 1..20: mol_type = genomic RNA
tatactgggagaaatgactt

SEQ ID NO: 5500 - RNA, 20 nt, Homo sapiens
  source 1..20: mol_type = genomic RNA
atactgggagaaatgacttt

SEQ ID NO: 5501 - RNA, 20 nt, Homo sapiens
  source 1..20: mol_type = genomic RNA
tactgggagaaatgactttg

SEQ ID NO: 5502 - RNA, 20 nt, Homo sapiens
  source 1..20: mol_type = genomic RNA
actgggagaaatgactttga

SEQ ID NO: 5503 - RNA, 20 nt, Homo sapiens
  source 1..20: mol_type = genomic RNA
ctgggagaaatgactttgaa

SEQ ID NO: 5504 - RNA, 20 nt, Homo sapiens
  source 1..20: mol_type = genomic RNA
tgggagaaatgactttgaaa

SEQ ID NO: 5505 - RNA, 20 nt, Homo sapiens
  source 1..20: mol_type = genomic RNA
gggagaaatgactttgaaaa

SEQ ID NO: 5506 - RNA, 20 nt, Homo sapiens
  source 1..20: mol_type = genomic RNA
ggagaaatgactttgaaaac

SEQ ID NO: 5507 - RNA, 20 nt, Homo sapiens
  source 1..20: mol_type = genomic RNA
gagaaatgactttgaaaacc

SEQ ID NO: 5508 - RNA, 20 nt, Homo sapiens
  source 1..20: mol_type = genomic RNA
agaaatgactttgaaaacct

SEQ ID NO: 5509 - RNA, 20 nt, Homo sapiens
  source 1..20: mol_type = genomic RNA
gaaatgactttgaaaacctg

SEQ ID NO: 5510 - RNA, 20 nt, Homo sapiens
  source 1..20: mol_type = genomic RNA
aaatgactttgaaaacctgg

SEQ ID NO: 5511 - RNA, 20 nt, Homo sapiens
  source 1..20: mol_type = genomic RNA
aatgactttgaaaacctggc

SEQ ID NO: 5512 - RNA, 20 nt, Homo sapiens
  source 1..20: mol_type = genomic RNA
atgactttgaaaacctggct

SEQ ID NO: 5513 - RNA, 20 nt, Homo sapiens
  source 1..20: mol_type = genomic RNA
tgactttgaaaacctggctc

SEQ ID NO: 5514 - RNA, 20 nt, Homo sapiens
  source 1..20: mol_type = genomic RNA
gactttgaaaacctggctct

SEQ ID NO: 5515 - RNA, 20 nt, Homo sapiens
  source 1..20: mol_type = genomic RNA
actttgaaaacctggctcta

SEQ ID NO: 5516 - RNA, 20 nt, Homo sapiens
  source 1..20: mol_type = genomic RNA
ctttgaaaacctggctctaa

SEQ ID NO: 5517 - RNA, 20 nt, Homo sapiens
  source 1..20: mol_type = genomic RNA
tttgaaaacctggctctaag

SEQ ID NO: 5518 - RNA, 20 nt, Homo sapiens
  source 1..20: mol_type = genomic RNA
ttgaaaacctggctctaagg

SEQ ID NO: 5519 - RNA, 20 nt, Homo sapiens
  source 1..20: mol_type = genomic RNA
tgaaaacctggctctaaggt

SEQ ID NO: 5520 - RNA, 20 nt, Homo sapiens
  source 1..20: mol_type = genomic RNA
gaaaacctggctctaaggtg

SEQ ID NO: 5521 - RNA, 20 nt, Homo sapiens
  source 1..20: mol_type = genomic RNA
aaaacctggctctaaggtgg

SEQ ID NO: 5522 - RNA, 20 nt, Homo sapiens
  source 1..20: mol_type = genomic RNA
aaacctggctctaaggtggg

SEQ ID NO: 5523 - RNA, 20 nt, Homo sapiens
  source 1..20: mol_type = genomic RNA
aacctggctctaaggtggga

SEQ ID NO: 5524 - RNA, 20 nt, Homo sapiens
  source 1..20: mol_type = genomic RNA
acctggctctaaggtgggat

SEQ ID NO: 5525 - RNA, 20 nt, Homo sapiens
  source 1..20: mol_type = genomic RNA
cctggctctaaggtgggatc

SEQ ID NO: 5526 - RNA, 20 nt, Homo sapiens
  source 1..20: mol_type = genomic RNA
ctggctctaaggtgggatca

SEQ ID NO: 5527 - RNA, 20 nt, Homo sapiens
  source 1..20: mol_type = genomic RNA
tggctctaaggtgggatcac

SEQ ID NO: 5528 - RNA, 20 nt, Homo sapiens
  source 1..20: mol_type = genomic RNA
ggctctaaggtgggatcact

SEQ ID NO: 5529 - RNA, 20 nt, Homo sapiens
  source 1..20: mol_type = genomic RNA
gctctaaggtgggatcacta

SEQ ID NO: 5530 - RNA, 20 nt, Homo sapiens
  source 1..20: mol_type = genomic RNA
ctctaaggtgggatcactaa

SEQ ID NO: 5531 - RNA, 20 nt, Homo sapiens
  source 1..20: mol_type = genomic RNA
tctaaggtgggatcactaag

SEQ ID NO: 5532 - RNA, 20 nt, Homo sapiens
  source 1..20: mol_type = genomic RNA
ctaaggtgggatcactaagg

SEQ ID NO: 5533 - RNA, 20 nt, Homo sapiens
  source 1..20: mol_type = genomic RNA
taaggtgggatcactaaggg

SEQ ID NO: 5534 - RNA, 20 nt, Homo sapiens
  source 1..20: mol_type = genomic RNA
aaggtgggatcactaaggga

SEQ ID NO: 5535 - RNA, 20 nt, Homo sapiens
  source 1..20: mol_type = genomic RNA
aggtgggatcactaagggat

SEQ ID NO: 5536 - RNA, 20 nt, Homo sapiens
  source 1..20: mol_type = genomic RNA
ggtgggatcactaagggatg

SEQ ID NO: 5537 - RNA, 20 nt, Homo sapiens
  source 1..20: mol_type = genomic RNA
gtgggatcactaagggatgg

SEQ ID NO: 5538 - RNA, 20 nt, Homo sapiens
  source 1..20: mol_type = genomic RNA
tgggatcactaagggatggg

SEQ ID NO: 5539 - RNA, 20 nt, Homo sapiens
  source 1..20: mol_type = genomic RNA
gggatcactaagggatgggg

SEQ ID NO: 5540 - RNA, 20 nt, Homo sapiens
  source 1..20: mol_type = genomic RNA
ggatcactaagggatggggc

SEQ ID NO: 5541 - RNA, 20 nt, Homo sapiens
  source 1..20: mol_type = genomic RNA
gatcactaagggatggggca

SEQ ID NO: 5542 - RNA, 20 nt, Homo sapiens
  source 1..20: mol_type = genomic RNA
atcactaagggatggggcag

SEQ ID NO: 5543 - RNA, 20 nt, Homo sapiens
  source 1..20: mol_type = genomic RNA
tcactaagggatggggcagt

SEQ ID NO: 5544 - RNA, 20 nt, Homo sapiens
  source 1..20: mol_type = genomic RNA
cactaagggatggggcagtc

SEQ ID NO: 5545 - RNA, 20 nt, Homo sapiens
  source 1..20: mol_type = genomic RNA
actaagggatggggcagtct

SEQ ID NO: 5546 - RNA, 20 nt, Homo sapiens
  source 1..20: mol_type = genomic RNA
ctaagggatggggcagtctc

SEQ ID NO: 5547 - RNA, 20 nt, Homo sapiens
  source 1..20: mol_type = genomic RNA
taagggatggggcagtctct

SEQ ID NO: 5548 - RNA, 20 nt, Homo sapiens
  source 1..20: mol_type = genomic RNA
aagggatggggcagtctctg

SEQ ID NO: 5549 - RNA, 20 nt, Homo sapiens
  source 1..20: mol_type = genomic RNA
agggatggggcagtctctgc

SEQ ID NO: 5550 - RNA, 20 nt, Homo sapiens
  source 1..20: mol_type = genomic RNA
gggatggggcagtctctgcc

SEQ ID NO: 5551 - RNA, 20 nt, Homo sapiens
  source 1..20: mol_type = genomic RNA
ggatggggcagtctctgccc

SEQ ID NO: 5552 - RNA, 20 nt, Homo sapiens
  source 1..20: mol_type = genomic RNA
gatggggcagtctctgccca

SEQ ID NO: 5553 - RNA, 20 nt, Homo sapiens
  source 1..20: mol_type = genomic RNA
atggggcagtctctgcccaa

SEQ ID NO: 5554 - RNA, 20 nt, Homo sapiens
  source 1..20: mol_type = genomic RNA
tggggcagtctctgcccaaa

SEQ ID NO: 5555 - RNA, 20 nt, Homo sapiens
  source 1..20: mol_type = genomic RNA
ggggcagtctctgcccaaac

SEQ ID NO: 5556 - RNA, 20 nt, Homo sapiens
  source 1..20: mol_type = genomic RNA
gggcagtctctgcccaaaca

SEQ ID NO: 5557 - RNA, 20 nt, Homo sapiens
  source 1..20: mol_type = genomic RNA
ggcagtctctgcccaaacat

SEQ ID NO: 5558 - RNA, 20 nt, Homo sapiens
  source 1..20: mol_type = genomic RNA
gcagtctctgcccaaacata

SEQ ID NO: 5559 - RNA, 20 nt, Homo sapiens
  source 1..20: mol_type = genomic RNA
cagtctctgcccaaacataa

SEQ ID NO: 5560 - RNA, 20 nt, Homo sapiens
  source 1..20: mol_type = genomic RNA
agtctctgcccaaacataaa

SEQ ID NO: 5561 - RNA, 20 nt, Homo sapiens
  source 1..20: mol_type = genomic RNA
gtctctgcccaaacataaag

SEQ ID NO: 5562 - RNA, 20 nt, Homo sapiens
  source 1..20: mol_type = genomic RNA
tctctgcccaaacataaaga

SEQ ID NO: 5563 - RNA, 20 nt, Homo sapiens
  source 1..20: mol_type = genomic RNA
ctctgcccaaacataaagag

SEQ ID NO: 5564 - RNA, 20 nt, Homo sapiens
  source 1..20: mol_type = genomic RNA
tctgcccaaacataaagaga

SEQ ID NO: 5565 - RNA, 20 nt, Homo sapiens
  source 1..20: mol_type = genomic RNA
ctgcccaaacataaagagaa

SEQ ID NO: 5566 - RNA, 20 nt, Homo sapiens
  source 1..20: mol_type = genomic RNA
tgcccaaacataaagagaac

SEQ ID NO: 5567 - RNA, 20 nt, Homo sapiens
  source 1..20: mol_type = genomic RNA
gcccaaacataaagagaact

SEQ ID NO: 5568 - RNA, 20 nt, Homo sapiens
  source 1..20: mol_type = genomic RNA
cccaaacataaagagaactc

SEQ ID NO: 5569 - RNA, 20 nt, Homo sapiens
  source 1..20: mol_type = genomic RNA
ccaaacataaagagaactct

SEQ ID NO: 5570 - RNA, 20 nt, Homo sapiens
  source 1..20: mol_type = genomic RNA
caaacataaagagaactctg

SEQ ID NO: 5571 - RNA, 20 nt, Homo sapiens
  source 1..20: mol_type = genomic RNA
aaacataaagagaactctgg

SEQ ID NO: 5572 - RNA, 20 nt, Homo sapiens
  source 1..20: mol_type = genomic RNA
aacataaagagaactctggg

SEQ ID NO: 5573 - RNA, 20 nt, Homo sapiens
  source 1..20: mol_type = genomic RNA
acataaagagaactctgggg

SEQ ID NO: 5574 - RNA, 20 nt, Homo sapiens
  source 1..20: mol_type = genomic RNA
cataaagagaactctgggga

SEQ ID NO: 5575 - RNA, 20 nt, Homo sapiens
  source 1..20: mol_type = genomic RNA
ataaagagaactctggggag

SEQ ID NO: 5576 - RNA, 20 nt, Homo sapiens
  source 1..20: mol_type = genomic RNA
taaagagaactctggggagc

SEQ ID NO: 5577 - RNA, 20 nt, Homo sapiens
  source 1..20: mol_type = genomic RNA
aaagagaactctggggagcc

SEQ ID NO: 5578 - RNA, 20 nt, Homo sapiens
  source 1..20: mol_type = genomic RNA
aagagaactctggggagcct

SEQ ID NO: 5579 - RNA, 20 nt, Homo sapiens
  source 1..20: mol_type = genomic RNA
agagaactctggggagcctg

SEQ ID NO: 5580 - RNA, 20 nt, Homo sapiens
  source 1..20: mol_type = genomic RNA
gagaactctggggagcctga

SEQ ID NO: 5581 - RNA, 20 nt, Homo sapiens
  source 1..20: mol_type = genomic RNA
agaactctggggagcctgag

SEQ ID NO: 5582 - RNA, 20 nt, Homo sapiens
  source 1..20: mol_type = genomic RNA
gaactctggggagcctgagc

SEQ ID NO: 5583 - RNA, 20 nt, Homo sapiens
  source 1..20: mol_type = genomic RNA
aactctggggagcctgagcc

SEQ ID NO: 5584 - RNA, 20 nt, Homo sapiens
  source 1..20: mol_type = genomic RNA
actctggggagcctgagcca

SEQ ID NO: 5585 - RNA, 20 nt, Homo sapiens
  source 1..20: mol_type = genomic RNA
ctctggggagcctgagccac

SEQ ID NO: 5586 - RNA, 20 nt, Homo sapiens
  source 1..20: mol_type = genomic RNA
tctggggagcctgagccaca

SEQ ID NO: 5587 - RNA, 20 nt, Homo sapiens
  source 1..20: mol_type = genomic RNA
ctggggagcctgagccacaa

SEQ ID NO: 5588 - RNA, 20 nt, Homo sapiens
  source 1..20: mol_type = genomic RNA
tggggagcctgagccacaaa

SEQ ID NO: 5589 - RNA, 20 nt, Homo sapiens
  source 1..20: mol_type = genomic RNA
ggggagcctgagccacaaaa

SEQ ID NO: 5590 - RNA, 20 nt, Homo sapiens
  source 1..20: mol_type = genomic RNA
gggagcctgagccacaaaaa

SEQ ID NO: 5591 - RNA, 20 nt, Homo sapiens
  source 1..20: mol_type = genomic RNA
ggagcctgagccacaaaaat

SEQ ID NO: 5592 - RNA, 20 nt, Homo sapiens
  source 1..20: mol_type = genomic RNA
gagcctgagccacaaaaatg

SEQ ID NO: 5593 - RNA, 20 nt, Homo sapiens
  source 1..20: mol_type = genomic RNA
agcctgagccacaaaaatgt

SEQ ID NO: 5594 - RNA, 20 nt, Homo sapiens
  source 1..20: mol_type = genomic RNA
gcctgagccacaaaaatgtt

SEQ ID NO: 5595 - RNA, 20 nt, Homo sapiens
  source 1..20: mol_type = genomic RNA
cctgagccacaaaaatgttc

SEQ ID NO: 5596 - RNA, 20 nt, Homo sapiens
  source 1..20: mol_type = genomic RNA
ctgagccacaaaaatgttcc

SEQ ID NO: 5597 - RNA, 20 nt, Homo sapiens
  source 1..20: mol_type = genomic RNA
tgagccacaaaaatgttcct

SEQ ID NO: 5598 - RNA, 20 nt, Homo sapiens
  source 1..20: mol_type = genomic RNA
gagccacaaaaatgttcctt

SEQ ID NO: 5599 - RNA, 20 nt, Homo sapiens
  source 1..20: mol_type = genomic RNA
agccacaaaaatgttccttt

SEQ ID NO: 5600 - RNA, 20 nt, Homo sapiens
  source 1..20: mol_type = genomic RNA
gccacaaaaatgttccttta

SEQ ID NO: 5601 - RNA, 20 nt, Homo sapiens
  source 1..20: mol_type = genomic RNA
ccacaaaaatgttcctttat

SEQ ID NO: 5602 - RNA, 20 nt, Homo sapiens
  source 1..20: mol_type = genomic RNA
cacaaaaatgttcctttatt

SEQ ID NO: 5603 - RNA, 20 nt, Homo sapiens
  source 1..20: mol_type = genomic RNA
acaaaaatgttcctttattt

SEQ ID NO: 5604 - RNA, 20 nt, Homo sapiens
  source 1..20: mol_type = genomic RNA
caaaaatgttcctttatttt

SEQ ID NO: 5605 - RNA, 20 nt, Homo sapiens
  source 1..20: mol_type = genomic RNA
aaaaatgttcctttatttta

SEQ ID NO: 5606 - RNA, 20 nt, Homo sapiens
  source 1..20: mol_type = genomic RNA
aaaatgttcctttattttat

SEQ ID NO: 5607 - RNA, 20 nt, Homo sapiens
  source 1..20: mol_type = genomic RNA
aaatgttcctttattttatg

SEQ ID NO: 5608 - RNA, 20 nt, Homo sapiens
  source 1..20: mol_type = genomic RNA
aatgttcctttattttatgt

SEQ ID NO: 5609 - RNA, 20 nt, Homo sapiens
  source 1..20: mol_type = genomic RNA
atgttcctttattttatgta

SEQ ID NO: 5610 - RNA, 20 nt, Homo sapiens
  source 1..20: mol_type = genomic RNA
tgttcctttattttatgtaa

SEQ ID NO: 5611 - RNA, 20 nt, Homo sapiens
  source 1..20: mol_type = genomic RNA
gttcctttattttatgtaaa

SEQ ID NO: 5612 - RNA, 20 nt, Homo sapiens
  source 1..20: mol_type = genomic RNA
ttcctttattttatgtaaac

SEQ ID NO: 5613 - RNA, 20 nt, Homo sapiens
  source 1..20: mol_type = genomic RNA
tcctttattttatgtaaacc

SEQ ID NO: 5614 - RNA, 20 nt, Homo sapiens
  source 1..20: mol_type = genomic RNA
cctttattttatgtaaaccc

SEQ ID NO: 5615 - RNA, 20 nt, Homo sapiens
  source 1..20: mol_type = genomic RNA
ctttattttatgtaaaccct

SEQ ID NO: 5616 - RNA, 20 nt, Homo sapiens
  source 1..20: mol_type = genomic RNA
tttattttatgtaaaccctc

SEQ ID NO: 5617 - RNA, 20 nt, Homo sapiens
  source 1..20: mol_type = genomic RNA
ttattttatgtaaaccctca

SEQ ID NO: 5618 - RNA, 20 nt, Homo sapiens
  source 1..20: mol_type = genomic RNA
tattttatgtaaaccctcaa

SEQ ID NO: 5619 - RNA, 20 nt, Homo sapiens
  source 1..20: mol_type = genomic RNA
attttatgtaaaccctcaag

SEQ ID NO: 5620 - RNA, 20 nt, Homo sapiens
  source 1..20: mol_type = genomic RNA
ttttatgtaaaccctcaagg

SEQ ID NO: 5621 - RNA, 20 nt, Homo sapiens
  source 1..20: mol_type = genomic RNA
tttatgtaaaccctcaaggg

SEQ ID NO: 5622 - RNA, 20 nt, Homo sapiens
  source 1..20: mol_type = genomic RNA
ttatgtaaaccctcaagggt

SEQ ID NO: 5623 - RNA, 20 nt, Homo sapiens
  source 1..20: mol_type = genomic RNA
tatgtaaaccctcaagggtt

SEQ ID NO: 5624 - RNA, 20 nt, Homo sapiens
  source 1..20: mol_type = genomic RNA
atgtaaaccctcaagggtta

SEQ ID NO: 5625 - RNA, 20 nt, Homo sapiens
  source 1..20: mol_type = genomic RNA
tgtaaaccctcaagggttat

SEQ ID NO: 5626 - RNA, 20 nt, Homo sapiens
  source 1..20: mol_type = genomic RNA
gtaaaccctcaagggttata

SEQ ID NO: 5627 - RNA, 20 nt, Homo sapiens
  source 1..20: mol_type = genomic RNA
taaaccctcaagggttatag

SEQ ID NO: 5628 - RNA, 20 nt, Homo sapiens
  source 1..20: mol_type = genomic RNA
aaaccctcaagggttataga

SEQ ID NO: 5629 - RNA, 20 nt, Homo sapiens
  source 1..20: mol_type = genomic RNA
aaccctcaagggttatagac

SEQ ID NO: 5630 - RNA, 20 nt, Homo sapiens
  source 1..20: mol_type = genomic RNA
accctcaagggttatagact

SEQ ID NO: 5631 - RNA, 20 nt, Homo sapiens
  source 1..20: mol_type = genomic RNA
ccctcaagggttatagactg

SEQ ID NO: 5632 - RNA, 20 nt, Homo sapiens
  source 1..20: mol_type = genomic RNA
cctcaagggttatagactgc

SEQ ID NO: 5633 - RNA, 20 nt, Homo sapiens
  source 1..20: mol_type = genomic RNA
ctcaagggttatagactgcc

SEQ ID NO: 5634 - RNA, 20 nt, Homo sapiens
  source 1..20: mol_type = genomic RNA
tcaagggttatagactgcca

SEQ ID NO: 5635 - RNA, 20 nt, Homo sapiens
  source 1..20: mol_type = genomic RNA
caagggttatagactgccat

SEQ ID NO: 5636 - RNA, 20 nt, Homo sapiens
  source 1..20: mol_type = genomic RNA
aagggttatagactgccatg

SEQ ID NO: 5637 - RNA, 20 nt, Homo sapiens
  source 1..20: mol_type = genomic RNA
agggttatagactgccatgc

SEQ ID NO: 5638 - RNA, 20 nt, Homo sapiens
  source 1..20: mol_type = genomic RNA
gggttatagactgccatgct

SEQ ID NO: 5639 - RNA, 20 nt, Homo sapiens
  source 1..20: mol_type = genomic RNA
ggttatagactgccatgcta

SEQ ID NO: 5640 - RNA, 20 nt, Homo sapiens
  source 1..20: mol_type = genomic RNA
gttatagactgccatgctag

SEQ ID NO: 5641 - RNA, 20 nt, Homo sapiens
  source 1..20: mol_type = genomic RNA
ttatagactgccatgctaga

SEQ ID NO: 5642 - RNA, 20 nt, Homo sapiens
  source 1..20: mol_type = genomic RNA
tatagactgccatgctagac

SEQ ID NO: 5643 - RNA, 20 nt, Homo sapiens
  source 1..20: mol_type = genomic RNA
atagactgccatgctagaca

SEQ ID NO: 5644 - RNA, 20 nt, Homo sapiens
  source 1..20: mol_type = genomic RNA
tagactgccatgctagacaa

SEQ ID NO: 5645 - RNA, 20 nt, Homo sapiens
  source 1..20: mol_type = genomic RNA
agactgccatgctagacaag

SEQ ID NO: 5646 - RNA, 20 nt, Homo sapiens
  source 1..20: mol_type = genomic RNA
gactgccatgctagacaagc

SEQ ID NO: 5647 - RNA, 20 nt, Homo sapiens
  source 1..20: mol_type = genomic RNA
actgccatgctagacaagct

SEQ ID NO: 5648 - RNA, 20 nt, Homo sapiens
  source 1..20: mol_type = genomic RNA
ctgccatgctagacaagctt

SEQ ID NO: 5649 - RNA, 20 nt, Homo sapiens
  source 1..20: mol_type = genomic RNA
tgccatgctagacaagcttg

SEQ ID NO: 5650 - RNA, 20 nt, Homo sapiens
  source 1..20: mol_type = genomic RNA
gccatgctagacaagcttgt

SEQ ID NO: 5651 - RNA, 20 nt, Homo sapiens
  source 1..20: mol_type = genomic RNA
ccatgctagacaagcttgtc

SEQ ID NO: 5652 - RNA, 20 nt, Homo sapiens
  source 1..20: mol_type = genomic RNA
catgctagacaagcttgtcc

SEQ ID NO: 5653 - RNA, 20 nt, Homo sapiens
  source 1..20: mol_type = genomic RNA
atgctagacaagcttgtcca

SEQ ID NO: 5654 - RNA, 20 nt, Homo sapiens
  source 1..20: mol_type = genomic RNA
tgctagacaagcttgtccat

SEQ ID NO: 5655 - RNA, 20 nt, Homo sapiens
  source 1..20: mol_type = genomic RNA
gctagacaagcttgtccatg

SEQ ID NO: 5656 - RNA, 20 nt, Homo sapiens
  source 1..20: mol_type = genomic RNA
ctagacaagcttgtccatgt

SEQ ID NO: 5657 - RNA, 20 nt, Homo sapiens
  source 1..20: mol_type = genomic RNA
tagacaagcttgtccatgta

SEQ ID NO: 5658 - RNA, 20 nt, Homo sapiens
  source 1..20: mol_type = genomic RNA
agacaagcttgtccatgtaa

SEQ ID NO: 5659 - RNA, 20 nt, Homo sapiens
  source 1..20: mol_type = genomic RNA
gacaagcttgtccatgtaat

SEQ ID NO: 5660 - RNA, 20 nt, Homo sapiens
  source 1..20: mol_type = genomic RNA
acaagcttgtccatgtaata

SEQ ID NO: 5661 - RNA, 20 nt, Homo sapiens
  source 1..20: mol_type = genomic RNA
caagcttgtccatgtaatat

SEQ ID NO: 5662 - RNA, 20 nt, Homo sapiens
  source 1..20: mol_type = genomic RNA
aagcttgtccatgtaatatt

SEQ ID NO: 5663 - RNA, 20 nt, Homo sapiens
  source 1..20: mol_type = genomic RNA
agcttgtccatgtaatattc

SEQ ID NO: 5664 - RNA, 20 nt, Homo sapiens
  source 1..20: mol_type = genomic RNA
gcttgtccatgtaatattcc

SEQ ID NO: 5665 - RNA, 20 nt, Homo sapiens
  source 1..20: mol_type = genomic RNA
cttgtccatgtaatattccc

SEQ ID NO: 5666 - RNA, 20 nt, Homo sapiens
  source 1..20: mol_type = genomic RNA
ttgtccatgtaatattccca

SEQ ID NO: 5667 - RNA, 20 nt, Homo sapiens
  source 1..20: mol_type = genomic RNA
tgtccatgtaatattcccat

SEQ ID NO: 5668 - RNA, 20 nt, Homo sapiens
  source 1..20: mol_type = genomic RNA
gtccatgtaatattcccatg

SEQ ID NO: 5669 - RNA, 20 nt, Homo sapiens
  source 1..20: mol_type = genomic RNA
tccatgtaatattcccatgt

SEQ ID NO: 5670 - RNA, 20 nt, Homo sapiens
  source 1..20: mol_type = genomic RNA
ccatgtaatattcccatgtt

SEQ ID NO: 5671 - RNA, 20 nt, Homo sapiens
  source 1..20: mol_type = genomic RNA
catgtaatattcccatgttt

SEQ ID NO: 5672 - RNA, 20 nt, Homo sapiens
  source 1..20: mol_type = genomic RNA
atgtaatattcccatgtttt

SEQ ID NO: 5673 - RNA, 20 nt, Homo sapiens
  source 1..20: mol_type = genomic RNA
tgtaatattcccatgttttt

SEQ ID NO: 5674 - RNA, 20 nt, Homo sapiens
  source 1..20: mol_type = genomic RNA
gtaatattcccatgttttta

SEQ ID NO: 5675 - RNA, 20 nt, Homo sapiens
  source 1..20: mol_type = genomic RNA
taatattcccatgtttttac

SEQ ID NO: 5676 - RNA, 20 nt, Homo sapiens
  source 1..20: mol_type = genomic RNA
aatattcccatgtttttacc

SEQ ID NO: 5677 - RNA, 20 nt, Homo sapiens
  source 1..20: mol_type = genomic RNA
atattcccatgtttttaccc

SEQ ID NO: 5678 - RNA, 20 nt, Homo sapiens
  source 1..20: mol_type = genomic RNA
tattcccatgtttttaccct

SEQ ID NO: 5679 - RNA, 20 nt, Homo sapiens
  source 1..20: mol_type = genomic RNA
attcccatgtttttaccctg

SEQ ID NO: 5680 - RNA, 20 nt, Homo sapiens
  source 1..20: mol_type = genomic RNA
ttcccatgtttttaccctgc

SEQ ID NO: 5681 - RNA, 20 nt, Homo sapiens
  source 1..20: mol_type = genomic RNA
tcccatgtttttaccctgcc

SEQ ID NO: 5682 - RNA, 20 nt, Homo sapiens
  source 1..20: mol_type = genomic RNA
cccatgtttttaccctgccc

SEQ ID NO: 5683 - RNA, 20 nt, Homo sapiens
  source 1..20: mol_type = genomic RNA
ccatgtttttaccctgcccc

SEQ ID NO: 5684 - RNA, 20 nt, Homo sapiens
  source 1..20: mol_type = genomic RNA
catgtttttaccctgcccct

SEQ ID NO: 5685 - RNA, 20 nt, Homo sapiens
  source 1..20: mol_type = genomic RNA
atgtttttaccctgcccctg

SEQ ID NO: 5686 - RNA, 20 nt, Homo sapiens
  source 1..20: mol_type = genomic RNA
tgtttttaccctgcccctgc

SEQ ID NO: 5687 - RNA, 20 nt, Homo sapiens
  source 1..20: mol_type = genomic RNA
gtttttaccctgcccctgcc

SEQ ID NO: 5688 - RNA, 20 nt, Homo sapiens
  source 1..20: mol_type = genomic RNA
tttttaccctgcccctgcct

SEQ ID NO: 5689 - RNA, 20 nt, Homo sapiens
  source 1..20: mol_type = genomic RNA
ttttaccctgcccctgcctt

SEQ ID NO: 5690 - RNA, 20 nt, Homo sapiens
  source 1..20: mol_type = genomic RNA
tttaccctgcccctgccttg

SEQ ID NO: 5691 - RNA, 20 nt, Homo sapiens
  source 1..20: mol_type = genomic RNA
ttaccctgcccctgccttga

SEQ ID NO: 5692 - RNA, 20 nt, Homo sapiens
  source 1..20: mol_type = genomic RNA
taccctgcccctgccttgat

SEQ ID NO: 5693 - RNA, 20 nt, Homo sapiens
  source 1..20: mol_type = genomic RNA
accctgcccctgccttgatt

SEQ ID NO: 5694 - RNA, 20 nt, Homo sapiens
  source 1..20: mol_type = genomic RNA
ccctgcccctgccttgatta

SEQ ID NO: 5695 - RNA, 20 nt, Homo sapiens
  source 1..20: mol_type = genomic RNA
cctgcccctgccttgattag

SEQ ID NO: 5696 - RNA, 20 nt, Homo sapiens
  source 1..20: mol_type = genomic RNA
ctgcccctgccttgattaga

SEQ ID NO: 5697 - RNA, 20 nt, Homo sapiens
  source 1..20: mol_type = genomic RNA
tgcccctgccttgattagac

SEQ ID NO: 5698 - RNA, 20 nt, Homo sapiens
  source 1..20: mol_type = genomic RNA
gcccctgccttgattagact

SEQ ID NO: 5699 - RNA, 20 nt, Homo sapiens
  source 1..20: mol_type = genomic RNA
cccctgccttgattagactc

SEQ ID NO: 5700 - RNA, 20 nt, Homo sapiens
  source 1..20: mol_type = genomic RNA
ccctgccttgattagactcc

SEQ ID NO: 5701 - RNA, 20 nt, Homo sapiens
  source 1..20: mol_type = genomic RNA
cctgccttgattagactcct

SEQ ID NO: 5702 - RNA, 20 nt, Homo sapiens
  source 1..20: mol_type = genomic RNA
ctgccttgattagactccta

SEQ ID NO: 5703 - RNA, 20 nt, Homo sapiens
  source 1..20: mol_type = genomic RNA
tgccttgattagactcctag

SEQ ID NO: 5704 - RNA, 20 nt, Homo sapiens
  source 1..20: mol_type = genomic RNA
gccttgattagactcctagc

SEQ ID NO: 5705 - RNA, 20 nt, Homo sapiens
  source 1..20: mol_type = genomic RNA
ccttgattagactcctagca

SEQ ID NO: 5706 - RNA, 20 nt, Homo sapiens
  source 1..20: mol_type = genomic RNA
cttgattagactcctagcac

SEQ ID NO: 5707 - RNA, 20 nt, Homo sapiens
  source 1..20: mol_type = genomic RNA
ttgattagactcctagcacc

SEQ ID NO: 5708 - RNA, 20 nt, Homo sapiens
  source 1..20: mol_type = genomic RNA
tgattagactcctagcacct

SEQ ID NO: 5709 - RNA, 20 nt, Homo sapiens
  source 1..20: mol_type = genomic RNA
gattagactcctagcacctg

SEQ ID NO: 5710 - RNA, 20 nt, Homo sapiens
  source 1..20: mol_type = genomic RNA
attagactcctagcacctgg

SEQ ID NO: 5711 - RNA, 20 nt, Homo sapiens
  source 1..20: mol_type = genomic RNA
ttagactcctagcacctggc

SEQ ID NO: 5712 - RNA, 20 nt, Homo sapiens
  source 1..20: mol_type = genomic RNA
tagactcctagcacctggct

SEQ ID NO: 5713 - RNA, 20 nt, Homo sapiens
  source 1..20: mol_type = genomic RNA
agactcctagcacctggcta

SEQ ID NO: 5714 - RNA, 20 nt, Homo sapiens
  source 1..20: mol_type = genomic RNA
gactcctagcacctggctag

SEQ ID NO: 5715 - RNA, 20 nt, Homo sapiens
  source 1..20: mol_type = genomic RNA
actcctagcacctggctagt

SEQ ID NO: 5716 - RNA, 20 nt, Homo sapiens
  source 1..20: mol_type = genomic RNA
ctcctagcacctggctagtt

SEQ ID NO: 5717 - RNA, 20 nt, Homo sapiens
  source 1..20: mol_type = genomic RNA
tcctagcacctggctagttt

SEQ ID NO: 5718 - RNA, 20 nt, Homo sapiens
  source 1..20: mol_type = genomic RNA
cctagcacctggctagtttc

SEQ ID NO: 5719 - RNA, 20 nt, Homo sapiens
  source 1..20: mol_type = genomic RNA
ctagcacctggctagtttct

SEQ ID NO: 5720 - RNA, 20 nt, Homo sapiens
  source 1..20: mol_type = genomic RNA
tagcacctggctagtttcta

SEQ ID NO: 5721 - RNA, 20 nt, Homo sapiens
  source 1..20: mol_type = genomic RNA
agcacctggctagtttctaa

SEQ ID NO: 5722 - RNA, 20 nt, Homo sapiens
  source 1..20: mol_type = genomic RNA
gcacctggctagtttctaac

SEQ ID NO: 5723 - RNA, 20 nt, Homo sapiens
  source 1..20: mol_type = genomic RNA
cacctggctagtttctaaca

SEQ ID NO: 5724 - RNA, 20 nt, Homo sapiens
  source 1..20: mol_type = genomic RNA
acctggctagtttctaacat

SEQ ID NO: 5725 - RNA, 20 nt, Homo sapiens
  source 1..20: mol_type = genomic RNA
cctggctagtttctaacatg

SEQ ID NO: 5726 - RNA, 20 nt, Homo sapiens
  source 1..20: mol_type = genomic RNA
ctggctagtttctaacatgt

SEQ ID NO: 5727 - RNA, 20 nt, Homo sapiens
  source 1..20: mol_type = genomic RNA
tggctagtttctaacatgtt

SEQ ID NO: 5728 - RNA, 20 nt, Homo sapiens
  source 1..20: mol_type = genomic RNA
ggctagtttctaacatgttt

SEQ ID NO: 5729 - RNA, 20 nt, Homo sapiens
  source 1..20: mol_type = genomic RNA
gctagtttctaacatgtttt

SEQ ID NO: 5730 - RNA, 20 nt, Homo sapiens
  source 1..20: mol_type = genomic RNA
ctagtttctaacatgttttg

SEQ ID NO: 5731 - RNA, 20 nt, Homo sapiens
  source 1..20: mol_type = genomic RNA
tagtttctaacatgttttgt

SEQ ID NO: 5732 - RNA, 20 nt, Homo sapiens
  source 1..20: mol_type = genomic RNA
agtttctaacatgttttgtg

SEQ ID NO: 5733 - RNA, 20 nt, Homo sapiens
  source 1..20: mol_type = genomic RNA
gtttctaacatgttttgtgc

SEQ ID NO: 5734 - RNA, 20 nt, Homo sapiens
  source 1..20: mol_type = genomic RNA
tttctaacatgttttgtgca

SEQ ID NO: 5735 - RNA, 20 nt, Homo sapiens
  source 1..20: mol_type = genomic RNA
ttctaacatgttttgtgcag

SEQ ID NO: 5736 - RNA, 20 nt, Homo sapiens
  source 1..20: mol_type = genomic RNA
tctaacatgttttgtgcagc

SEQ ID NO: 5737 - RNA, 20 nt, Homo sapiens
  source 1..20: mol_type = genomic RNA
ctaacatgttttgtgcagca

SEQ ID NO: 5738 - RNA, 20 nt, Homo sapiens
  source 1..20: mol_type = genomic RNA
taacatgttttgtgcagcac

SEQ ID NO: 5739 - RNA, 20 nt, Homo sapiens
  source 1..20: mol_type = genomic RNA
aacatgttttgtgcagcaca

SEQ ID NO: 5740 - RNA, 20 nt, Homo sapiens
  source 1..20: mol_type = genomic RNA
acatgttttgtgcagcacag

SEQ ID NO: 5741 - RNA, 20 nt, Homo sapiens
  source 1..20: mol_type = genomic RNA
catgttttgtgcagcacagt

SEQ ID NO: 5742 - RNA, 20 nt, Homo sapiens
  source 1..20: mol_type = genomic RNA
atgttttgtgcagcacagtt

SEQ ID NO: 5743 - RNA, 20 nt, Homo sapiens
  source 1..20: mol_type = genomic RNA
tgttttgtgcagcacagttt

SEQ ID NO: 5744 - RNA, 20 nt, Homo sapiens
  source 1..20: mol_type = genomic RNA
gttttgtgcagcacagtttt

SEQ ID NO: 5745 - RNA, 20 nt, Homo sapiens
  source 1..20: mol_type = genomic RNA
ttttgtgcagcacagttttt

SEQ ID NO: 5746 - RNA, 20 nt, Homo sapiens
  source 1..20: mol_type = genomic RNA
tttgtgcagcacagttttta

SEQ ID NO: 5747 - RNA, 20 nt, Homo sapiens
  source 1..20: mol_type = genomic RNA
ttgtgcagcacagtttttaa

SEQ ID NO: 5748 - RNA, 20 nt, Homo sapiens
  source 1..20: mol_type = genomic RNA
tgtgcagcacagtttttaat

SEQ ID NO: 5749 - RNA, 20 nt, Homo sapiens
  source 1..20: mol_type = genomic RNA
gtgcagcacagtttttaata

SEQ ID NO: 5750 - RNA, 20 nt, Homo sapiens
  source 1..20: mol_type = genomic RNA
tgcagcacagtttttaataa

SEQ ID NO: 5751 - RNA, 20 nt, Homo sapiens
  source 1..20: mol_type = genomic RNA
gcagcacagtttttaataaa

SEQ ID NO: 5752 - RNA, 20 nt, Homo sapiens
  source 1..20: mol_type = genomic RNA
cagcacagtttttaataaat

SEQ ID NO: 5753 - RNA, 20 nt, Homo sapiens
  source 1..20: mol_type = genomic RNA
agcacagtttttaataaatg

SEQ ID NO: 5754 - RNA, 20 nt, Homo sapiens
  source 1..20: mol_type = genomic RNA
gcacagtttttaataaatgc

SEQ ID NO: 5755 - RNA, 20 nt, Homo sapiens
  source 1..20: mol_type = genomic RNA
cacagtttttaataaatgct

SEQ ID NO: 5756 - RNA, 20 nt, Homo sapiens
  source 1..20: mol_type = genomic RNA
acagtttttaataaatgctt

SEQ ID NO: 5757 - RNA, 20 nt, Homo sapiens
  source 1..20: mol_type = genomic RNA
cagtttttaataaatgcttg

SEQ ID NO: 5758 - RNA, 20 nt, Homo sapiens
  source 1..20: mol_type = genomic RNA
agtttttaataaatgcttgt

SEQ ID NO: 5759 - RNA, 20 nt, Homo sapiens
  source 1..20: mol_type = genomic RNA
gtttttaataaatgcttgtt

SEQ ID NO: 5760 - RNA, 20 nt, Homo sapiens
  source 1..20: mol_type = genomic RNA
tttttaataaatgcttgtta

SEQ ID NO: 5761 - RNA, 20 nt, Homo sapiens
  source 1..20: mol_type = genomic RNA
ttttaataaatgcttgttac

SEQ ID NO: 5762 - RNA, 20 nt, Homo sapiens
  source 1..20: mol_type = genomic RNA
tttaataaatgcttgttaca

SEQ ID NO: 5763 - RNA, 20 nt, Homo sapiens
  source 1..20: mol_type = genomic RNA
ttaataaatgcttgttacat

SEQ ID NO: 5764 - RNA, 20 nt, Homo sapiens
  source 1..20: mol_type = genomic RNA
taataaatgcttgttacatt

SEQ ID NO: 5765 - RNA, 20 nt, Homo sapiens
  source 1..20: mol_type = genomic RNA
aataaatgcttgttacattc

SEQ ID NO: 5766 - RNA, 20 nt, Homo sapiens
  source 1..20: mol_type = genomic RNA
ataaatgcttgttacattca

SEQ ID NO: 5767 - RNA, 20 nt, Homo sapiens
  source 1..20: mol_type = genomic RNA
taaatgcttgttacattcat

SEQ ID NO: 5768 - RNA, 20 nt, Homo sapiens
  source 1..20: mol_type = genomic RNA
aaatgcttgttacattcatt

SEQ ID NO: 5769 - RNA, 20 nt, Homo sapiens
  source 1..20: mol_type = genomic RNA
aatgcttgttacattcattt

SEQ ID NO: 5770 - RNA, 20 nt, Homo sapiens
  source 1..20: mol_type = genomic RNA
atgcttgttacattcattta

SEQ ID NO: 5771 - RNA, 20 nt, Homo sapiens
  source 1..20: mol_type = genomic RNA
tgcttgttacattcatttaa

SEQ ID NO: 5772 - RNA, 20 nt, Homo sapiens
  source 1..20: mol_type = genomic RNA
gcttgttacattcatttaaa

SEQ ID NO: 5773 - RNA, 20 nt, Homo sapiens
  source 1..20: mol_type = genomic RNA
cttgttacattcatttaaaa

SEQ ID NO: 5774 - RNA, 20 nt, Homo sapiens
  source 1..20: mol_type = genomic RNA
ttgttacattcatttaaaaa

SEQ ID NO: 5775 - RNA, 20 nt, Homo sapiens
  source 1..20: mol_type = genomic RNA
tgttacattcatttaaaaaa

SEQ ID NO: 5776 - RNA, 20 nt, Homo sapiens
  source 1..20: mol_type = genomic RNA
gttacattcatttaaaaaaa

SEQ ID NO: 5777 - RNA, 20 nt, Homo sapiens
  source 1..20: mol_type = genomic RNA
ttacattcatttaaaaaaaa

SEQ ID NO: 5778 - RNA, 20 nt, Homo sapiens
  source 1..20: mol_type = genomic RNA
tacattcatttaaaaaaaaa

SEQ ID NO: 5779 - RNA, 20 nt, Homo sapiens
  source 1..20: mol_type = genomic RNA
acattcatttaaaaaaaaaa

SEQ ID NO: 5780 - RNA, 20 nt, Homo sapiens
  source 1..20: mol_type = genomic RNA
cattcatttaaaaaaaaaaa

SEQ ID NO: 5781 - RNA, 20 nt, Homo sapiens
  source 1..20: mol_type = genomic RNA
attcatttaaaaaaaaaaaa

SEQ ID NO: 5782 - RNA, 20 nt, Homo sapiens
  source 1..20: mol_type = genomic RNA
ttcatttaaaaaaaaaaaaa

SEQ ID NO: 5783 - RNA, 20 nt, Homo sapiens
  source 1..20: mol_type = genomic RNA
tcatttaaaaaaaaaaaaaa

SEQ ID NO: 5784 - RNA, 20 nt, Homo sapiens
  source 1..20: mol_type = genomic RNA
agttagagccgatctcccgc

SEQ ID NO: 5785 - RNA, 20 nt, Homo sapiens
  source 1..20: mol_type = genomic RNA
gttagagccgatctcccgcg

SEQ ID NO: 5786 - RNA, 20 nt, Homo sapiens
  source 1..20: mol_type = genomic RNA
ttagagccgatctcccgcgc

SEQ ID NO: 5787 - RNA, 20 nt, Homo sapiens
  source 1..20: mol_type = genomic RNA
tagagccgatctcccgcgcc

SEQ ID NO: 5788 - RNA, 20 nt, Homo sapiens
  source 1..20: mol_type = genomic RNA
agagccgatctcccgcgccc

SEQ ID NO: 5789 - RNA, 20 nt, Homo sapiens
  source 1..20: mol_type = genomic RNA
gagccgatctcccgcgcccc

SEQ ID NO: 5790 - RNA, 20 nt, Homo sapiens
  source 1..20: mol_type = genomic RNA
agccgatctcccgcgccccg

SEQ ID NO: 5791 - RNA, 20 nt, Homo sapiens
  source 1..20: mol_type = genomic RNA
gccgatctcccgcgccccga

SEQ ID NO: 5792 - RNA, 20 nt, Homo sapiens
  source 1..20: mol_type = genomic RNA
ccgatctcccgcgccccgag

SEQ ID NO: 5793 - RNA, 20 nt, Homo sapiens
  source 1..20: mol_type = genomic RNA
cgatctcccgcgccccgagg

SEQ ID NO: 5794 - RNA, 20 nt, Homo sapiens
  source 1..20: mol_type = genomic RNA
gatctcccgcgccccgaggt

SEQ ID NO: 5795 - RNA, 20 nt, Homo sapiens
  source 1..20: mol_type = genomic RNA
atctcccgcgccccgaggtt

SEQ ID NO: 5796 - RNA, 20 nt, Homo sapiens
  source 1..20: mol_type = genomic RNA
tctcccgcgccccgaggttg

SEQ ID NO: 5797 - RNA, 20 nt, Homo sapiens
  source 1..20: mol_type = genomic RNA
ctcccgcgccccgaggttgc

SEQ ID NO: 5798 - RNA, 20 nt, Homo sapiens
  source 1..20: mol_type = genomic RNA
tcccgcgccccgaggttgct

SEQ ID NO: 5799 - RNA, 20 nt, Homo sapiens
  source 1..20: mol_type = genomic RNA
cccgcgccccgaggttgctc

SEQ ID NO: 5800 - RNA, 20 nt, Homo sapiens
  source 1..20: mol_type = genomic RNA
ccgcgccccgaggttgctcc

SEQ ID NO: 5801 - RNA, 20 nt, Homo sapiens
  source 1..20: mol_type = genomic RNA
cgcgccccgaggttgctcct

SEQ ID NO: 5802 - RNA, 20 nt, Homo sapiens
  source 1..20: mol_type = genomic RNA
gcgccccgaggttgctcctc

SEQ ID NO: 5803 - RNA, 20 nt, Homo sapiens
  source 1..20: mol_type = genomic RNA
cgccccgaggttgctcctct

SEQ ID NO: 5804 - RNA, 20 nt, Homo sapiens
  source 1..20: mol_type = genomic RNA
gccccgaggttgctcctctc

SEQ ID NO: 5805 - RNA, 20 nt, Homo sapiens
  source 1..20: mol_type = genomic RNA
ccccgaggttgctcctctcc

SEQ ID NO: 5806 - RNA, 20 nt, Homo sapiens
  source 1..20: mol_type = genomic RNA
cccgaggttgctcctctccg

SEQ ID NO: 5807 - RNA, 20 nt, Homo sapiens
  source 1..20: mol_type = genomic RNA
ccgaggttgctcctctccga

SEQ ID NO: 5808 - RNA, 20 nt, Homo sapiens
  source 1..20: mol_type = genomic RNA
cgaggttgctcctctccgag

SEQ ID NO: 5809 - RNA, 20 nt, Homo sapiens
  source 1..20: mol_type = genomic RNA
gaggttgctcctctccgagg

SEQ ID NO: 5810 - RNA, 20 nt, Homo sapiens
  source 1..20: mol_type = genomic RNA
aggttgctcctctccgaggt

SEQ ID NO: 5811 - RNA, 20 nt, Homo sapiens
  source 1..20: mol_type = genomic RNA
ggttgctcctctccgaggtc

SEQ ID NO: 5812 - RNA, 20 nt, Homo sapiens
  source 1..20: mol_type = genomic RNA
gttgctcctctccgaggtct

SEQ ID NO: 5813 - RNA, 20 nt, Homo sapiens
  source 1..20: mol_type = genomic RNA
ttgctcctctccgaggtctc

SEQ ID NO: 5814 - RNA, 20 nt, Homo sapiens
  source 1..20: mol_type = genomic RNA
tgctcctctccgaggtctcc

SEQ ID NO: 5815 - RNA, 20 nt, Homo sapiens
  source 1..20: mol_type = genomic RNA
gctcctctccgaggtctccc

SEQ ID NO: 5816 - RNA, 20 nt, Homo sapiens
  source 1..20: mol_type = genomic RNA
ctcctctccgaggtctcccg

SEQ ID NO: 5817 - RNA, 20 nt, Homo sapiens
  source 1..20: mol_type = genomic RNA
tcctctccgaggtctcccgc

SEQ ID NO: 5818 - RNA, 20 nt, Homo sapiens
  source 1..20: mol_type = genomic RNA
cctctccgaggtctcccgcg

SEQ ID NO: 5819 - RNA, 20 nt, Homo sapiens
  source 1..20: mol_type = genomic RNA
ctctccgaggtctcccgcgg

SEQ ID NO: 5820 - RNA, 20 nt, Homo sapiens
  source 1..20: mol_type = genomic RNA
tctccgaggtctcccgcggc

SEQ ID NO: 5821 - RNA, 20 nt, Homo sapiens
  source 1..20: mol_type = genomic RNA
ctccgaggtctcccgcggcc

SEQ ID NO: 5822 - RNA, 20 nt, Homo sapiens
  source 1..20: mol_type = genomic RNA
tccgaggtctcccgcggccc

SEQ ID NO: 5823 - RNA, 20 nt, Homo sapiens
  source 1..20: mol_type = genomic RNA
ccgaggtctcccgcggccca

SEQ ID NO: 5824 - RNA, 20 nt, Homo sapiens
  source 1..20: mol_type = genomic RNA
cgaggtctcccgcggcccaa

SEQ ID NO: 5825 - RNA, 20 nt, Homo sapiens
  source 1..20: mol_type = genomic RNA
gaggtctcccgcggcccaag

SEQ ID NO: 5826 - RNA, 20 nt, Homo sapiens
  source 1..20: mol_type = genomic RNA
aggtctcccgcggcccaagt

SEQ ID NO: 5827 - RNA, 20 nt, Homo sapiens
  source 1..20: mol_type = genomic RNA
ggtctcccgcggcccaagtt

SEQ ID NO: 5828 - RNA, 20 nt, Homo sapiens
  source 1..20: mol_type = genomic RNA
gtctcccgcggcccaagttc

SEQ ID NO: 5829 - RNA, 20 nt, Homo sapiens
  source 1..20: mol_type = genomic RNA
tctcccgcggcccaagttct

SEQ ID NO: 5830 - RNA, 20 nt, Homo sapiens
  source 1..20: mol_type = genomic RNA
ctcccgcggcccaagttctc

SEQ ID NO: 5831 - RNA, 20 nt, Homo sapiens
  source 1..20: mol_type = genomic RNA
tcccgcggcccaagttctcc

SEQ ID NO: 5832 - RNA, 20 nt, Homo sapiens
  source 1..20: mol_type = genomic RNA
cccgcggcccaagttctccg

SEQ ID NO: 5833 - RNA, 20 nt, Homo sapiens
  source 1..20: mol_type = genomic RNA
ccgcggcccaagttctccgc

SEQ ID NO: 5834 - RNA, 20 nt, Homo sapiens
  source 1..20: mol_type = genomic RNA
cgcggcccaagttctccgcg

SEQ ID NO: 5835 - RNA, 20 nt, Homo sapiens
  source 1..20: mol_type = genomic RNA
gcggcccaagttctccgcgc

SEQ ID NO: 5836 - RNA, 20 nt, Homo sapiens
  source 1..20: mol_type = genomic RNA
cggcccaagttctccgcgcc

SEQ ID NO: 5837 - RNA, 20 nt, Homo sapiens
  source 1..20: mol_type = genomic RNA
ggcccaagttctccgcgccc

SEQ ID NO: 5838 - RNA, 20 nt, Homo sapiens
  source 1..20: mol_type = genomic RNA
gcccaagttctccgcgcccc

SEQ ID NO: 5839 - RNA, 20 nt, Homo sapiens
  source 1..20: mol_type = genomic RNA
cccaagttctccgcgccccg

SEQ ID NO: 5840 - RNA, 20 nt, Homo sapiens
  source 1..20: mol_type = genomic RNA
ccaagttctccgcgccccga

SEQ ID NO: 5841 - RNA, 20 nt, Homo sapiens
  source 1..20: mol_type = genomic RNA
caagttctccgcgccccgag

SEQ ID NO: 5842 - RNA, 20 nt, Homo sapiens
  source 1..20: mol_type = genomic RNA
aagttctccgcgccccgagg

SEQ ID NO: 5843 - RNA, 20 nt, Homo sapiens
  source 1..20: mol_type = genomic RNA
agttctccgcgccccgaggt

SEQ ID NO: 5844 - RNA, 20 nt, Homo sapiens
  source 1..20: mol_type = genomic RNA
gttctccgcgccccgaggtc

SEQ ID NO: 5845 - RNA, 20 nt, Homo sapiens
  source 1..20: mol_type = genomic RNA
ttctccgcgccccgaggtct

SEQ ID NO: 5846 - RNA, 20 nt, Homo sapiens
  source 1..20: mol_type = genomic RNA
tctccgcgccccgaggtctc

SEQ ID NO: 5847 - RNA, 20 nt, Homo sapiens
  source 1..20: mol_type = genomic RNA
ctccgcgccccgaggtctcc

SEQ ID NO: 5848 - RNA, 20 nt, Homo sapiens
  source 1..20: mol_type = genomic RNA
tccgcgccccgaggtctccg

SEQ ID NO: 5849 - RNA, 20 nt, Homo sapiens
  source 1..20: mol_type = genomic RNA
ccgcgccccgaggtctccgc

SEQ ID NO: 5850 - RNA, 20 nt, Homo sapiens
  source 1..20: mol_type = genomic RNA
cgcgccccgaggtctccgcg

SEQ ID NO: 5851 - RNA, 20 nt, Homo sapiens
  source 1..20: mol_type = genomic RNA
gcgccccgaggtctccgcgc

SEQ ID NO: 5852 - RNA, 20 nt, Homo sapiens
  source 1..20: mol_type = genomic RNA
cgccccgaggtctccgcgcc

SEQ ID NO: 5853 - RNA, 20 nt, Homo sapiens
  source 1..20: mol_type = genomic RNA
gccccgaggtctccgcgccc

SEQ ID NO: 5854 - RNA, 20 nt, Homo sapiens
  source 1..20: mol_type = genomic RNA
ccccgaggtctccgcgcccc

SEQ ID NO: 5855 - RNA, 20 nt, Homo sapiens
  source 1..20: mol_type = genomic RNA
cccgaggtctccgcgccccg

SEQ ID NO: 5856 - RNA, 20 nt, Homo sapiens
  source 1..20: mol_type = genomic RNA
ccgaggtctccgcgccccga

SEQ ID NO: 5857 - RNA, 20 nt, Homo sapiens
  source 1..20: mol_type = genomic RNA
cgaggtctccgcgccccgag

SEQ ID NO: 5858 - RNA, 20 nt, Homo sapiens
  source 1..20: mol_type = genomic RNA
gaggtctccgcgccccgagg

SEQ ID NO: 5859 - RNA, 20 nt, Homo sapiens
  source 1..20: mol_type = genomic RNA
aggtctccgcgccccgaggt

SEQ ID NO: 5860 - RNA, 20 nt, Homo sapiens
  source 1..20: mol_type = genomic RNA
ggtctccgcgccccgaggtc

SEQ ID NO: 5861 - RNA, 20 nt, Homo sapiens
  source 1..20: mol_type = genomic RNA
gtctccgcgccccgaggtct

SEQ ID NO: 5862 - RNA, 20 nt, Homo sapiens
  source 1..20: mol_type = genomic RNA
tctccgcgccccgaggtctc

SEQ ID NO: 5863 - RNA, 20 nt, Homo sapiens
  source 1..20: mol_type = genomic RNA
ctccgcgccccgaggtctcc

SEQ ID NO: 5864 - RNA, 20 nt, Homo sapiens
  source 1..20: mol_type = genomic RNA
tccgcgccccgaggtctccg

SEQ ID NO: 5865 - RNA, 20 nt, Homo sapiens
  source 1..20: mol_type = genomic RNA
ccgcgccccgaggtctccgc

SEQ ID NO: 5866 - RNA, 20 nt, Homo sapiens
  source 1..20: mol_type = genomic RNA
cgcgccccgaggtctccgcg

SEQ ID NO: 5867 - RNA, 20 nt, Homo sapiens
  source 1..20: mol_type = genomic RNA
gcgccccgaggtctccgcgg

SEQ ID NO: 5868 - RNA, 20 nt, Homo sapiens
  source 1..20: mol_type = genomic RNA
cgccccgaggtctccgcggc

SEQ ID NO: 5869 - RNA, 20 nt, Homo sapiens
  source 1..20: mol_type = genomic RNA
gccccgaggtctccgcggcc

SEQ ID NO: 5870 - RNA, 20 nt, Homo sapiens
  source 1..20: mol_type = genomic RNA
ccccgaggtctccgcggccc

SEQ ID NO: 5871 - RNA, 20 nt, Homo sapiens
  source 1..20: mol_type = genomic RNA
cccgaggtctccgcggcccg

SEQ ID NO: 5872 - RNA, 20 nt, Homo sapiens
  source 1..20: mol_type = genomic RNA
ccgaggtctccgcggcccga

SEQ ID NO: 5873 - RNA, 20 nt, Homo sapiens
  source 1..20: mol_type = genomic RNA
cgaggtctccgcggcccgag

SEQ ID NO: 5874 - RNA, 20 nt, Homo sapiens
  source 1..20: mol_type = genomic RNA
gaggtctccgcggcccgagg

SEQ ID NO: 5875 - RNA, 20 nt, Homo sapiens
  source 1..20: mol_type = genomic RNA
aggtctccgcggcccgaggt

SEQ ID NO: 5876 - RNA, 20 nt, Homo sapiens
  source 1..20: mol_type = genomic RNA
ggtctccgcggcccgaggtc

SEQ ID NO: 5877 - RNA, 20 nt, Homo sapiens
  source 1..20: mol_type = genomic RNA
gtctccgcggcccgaggtct

SEQ ID NO: 5878 - RNA, 20 nt, Homo sapiens
  source 1..20: mol_type = genomic RNA
tctccgcggcccgaggtctc

SEQ ID NO: 5879 - RNA, 20 nt, Homo sapiens
  source 1..20: mol_type = genomic RNA
ctccgcggcccgaggtctcc

SEQ ID NO: 5880 - RNA, 20 nt, Homo sapiens
  source 1..20: mol_type = genomic RNA
tccgcggcccgaggtctccg

SEQ ID NO: 5881 - RNA, 20 nt, Homo sapiens
  source 1..20: mol_type = genomic RNA
ccgcggcccgaggtctccgc

SEQ ID NO: 5882 - RNA, 20 nt, Homo sapiens
  source 1..20: mol_type = genomic RNA
cgcggcccgaggtctccgcc

SEQ ID NO: 5883 - RNA, 20 nt, Homo sapiens
  source 1..20: mol_type = genomic RNA
gcggcccgaggtctccgccc

SEQ ID NO: 5884 - RNA, 20 nt, Homo sapiens
  source 1..20: mol_type = genomic RNA
cggcccgaggtctccgcccg

SEQ ID NO: 5885 - RNA, 20 nt, Homo sapiens
  source 1..20: mol_type = genomic RNA
ggcccgaggtctccgcccgc

SEQ ID NO: 5886 - RNA, 20 nt, Homo sapiens
  source 1..20: mol_type = genomic RNA
gcccgaggtctccgcccgca

SEQ ID NO: 5887 - RNA, 20 nt, Homo sapiens
  source 1..20: mol_type = genomic RNA
cccgaggtctccgcccgcac

SEQ ID NO: 5888 - RNA, 20 nt, Homo sapiens
  source 1..20: mol_type = genomic RNA
ccgaggtctccgcccgcacc

SEQ ID NO: 5889 - RNA, 20 nt, Homo sapiens
  source 1..20: mol_type = genomic RNA
cgaggtctccgcccgcacca

SEQ ID NO: 5890 - RNA, 20 nt, Homo sapiens
  source 1..20: mol_type = genomic RNA
gaggtctccgcccgcaccat

SEQ ID NO: 5891 - RNA, 20 nt, Homo sapiens
  source 1..20: mol_type = genomic RNA
aggtctccgcccgcaccatg

SEQ ID NO: 5892 - RNA, 20 nt, Homo sapiens
  source 1..20: mol_type = genomic RNA
ggtctccgcccgcaccatgc

SEQ ID NO: 5893 - RNA, 20 nt, Homo sapiens
  source 1..20: mol_type = genomic RNA
gtctccgcccgcaccatgcg

SEQ ID NO: 5894 - RNA, 20 nt, Homo sapiens
  source 1..20: mol_type = genomic RNA
tctccgcccgcaccatgcgg

SEQ ID NO: 5895 - RNA, 20 nt, Homo sapiens
  source 1..20: mol_type = genomic RNA
ctccgcccgcaccatgcggc

SEQ ID NO: 5896 - RNA, 20 nt, Homo sapiens
  source 1..20: mol_type = genomic RNA
tccgcccgcaccatgcggct

SEQ ID NO: 5897 - RNA, 20 nt, Homo sapiens
  source 1..20: mol_type = genomic RNA
ccgcccgcaccatgcggctg

SEQ ID NO: 5898 - RNA, 20 nt, Homo sapiens
  source 1..20: mol_type = genomic RNA
cgcccgcaccatgcggctgg

SEQ ID NO: 5899 - RNA, 20 nt, Homo sapiens
  source 1..20: mol_type = genomic RNA
gcccgcaccatgcggctggg

SEQ ID NO: 5900 - RNA, 20 nt, Homo sapiens
  source 1..20: mol_type = genomic RNA
cccgcaccatgcggctgggc

SEQ ID NO: 5901 - RNA, 20 nt, Homo sapiens
  source 1..20: mol_type = genomic RNA
ccgcaccatgcggctgggca

SEQ ID NO: 5902 - RNA, 20 nt, Homo sapiens
  source 1..20: mol_type = genomic RNA
cgcaccatgcggctgggcag

SEQ ID NO: 5903 - RNA, 20 nt, Homo sapiens
  source 1..20: mol_type = genomic RNA
gcaccatgcggctgggcagt

SEQ ID NO: 5904 - RNA, 20 nt, Homo sapiens
  source 1..20: mol_type = genomic RNA
caccatgcggctgggcagtc

SEQ ID NO: 5905 - RNA, 20 nt, Homo sapiens
  source 1..20: mol_type = genomic RNA
accatgcggctgggcagtcc

SEQ ID NO: 5906 - RNA, 20 nt, Homo sapiens
  source 1..20: mol_type = genomic RNA
ccatgcggctgggcagtcct

SEQ ID NO: 5907 - RNA, 20 nt, Homo sapiens
  source 1..20: mol_type = genomic RNA
catgcggctgggcagtcctg

SEQ ID NO: 5908 - RNA, 20 nt, Homo sapiens
  source 1..20: mol_type = genomic RNA
atgcggctgggcagtcctgg

SEQ ID NO: 5909 - RNA, 20 nt, Homo sapiens
  source 1..20: mol_type = genomic RNA
tgcggctgggcagtcctgga

SEQ ID NO: 5910 - RNA, 20 nt, Homo sapiens
  source 1..20: mol_type = genomic RNA
gcggctgggcagtcctggac

SEQ ID NO: 5911 - RNA, 20 nt, Homo sapiens
  source 1..20: mol_type = genomic RNA
cggctgggcagtcctggact

SEQ ID NO: 5912 - RNA, 20 nt, Homo sapiens
  source 1..20: mol_type = genomic RNA
ggctgggcagtcctggactg

SEQ ID NO: 5913 - RNA, 20 nt, Homo sapiens
  source 1..20: mol_type = genomic RNA
gctgggcagtcctggactgc

SEQ ID NO: 5914 - RNA, 20 nt, Homo sapiens
  source 1..20: mol_type = genomic RNA
ctgggcagtcctggactgct

SEQ ID NO: 5915 - RNA, 20 nt, Homo sapiens
  source 1..20: mol_type = genomic RNA
tgggcagtcctggactgctc

SEQ ID NO: 5916 - RNA, 20 nt, Homo sapiens
  source 1..20: mol_type = genomic RNA
gggcagtcctggactgctct

SEQ ID NO: 5917 - RNA, 20 nt, Homo sapiens
  source 1..20: mol_type = genomic RNA
ggcagtcctggactgctctt

SEQ ID NO: 5918 - RNA, 20 nt, Homo sapiens
  source 1..20: mol_type = genomic RNA
gcagtcctggactgctcttc

SEQ ID NO: 5919 - RNA, 20 nt, Homo sapiens
  source 1..20: mol_type = genomic RNA
cagtcctggactgctcttcc

SEQ ID NO: 5920 - RNA, 20 nt, Homo sapiens
  source 1..20: mol_type = genomic RNA
agtcctggactgctcttcct

SEQ ID NO: 5921 - RNA, 20 nt, Homo sapiens
  source 1..20: mol_type = genomic RNA
gtcctggactgctcttcctg

SEQ ID NO: 5922 - RNA, 20 nt, Homo sapiens
  source 1..20: mol_type = genomic RNA
tcctggactgctcttcctgc

SEQ ID NO: 5923 - RNA, 20 nt, Homo sapiens
  source 1..20: mol_type = genomic RNA
cctggactgctcttcctgct

SEQ ID NO: 5924 - RNA, 20 nt, Homo sapiens
  source 1..20: mol_type = genomic RNA
ctggactgctcttcctgctc

SEQ ID NO: 5925 - RNA, 20 nt, Homo sapiens
  source 1..20: mol_type = genomic RNA
tggactgctcttcctgctct

SEQ ID NO: 5926 - RNA, 20 nt, Homo sapiens
  source 1..20: mol_type = genomic RNA
ggactgctcttcctgctctt

SEQ ID NO: 5927 - RNA, 20 nt, Homo sapiens
  source 1..20: mol_type = genomic RNA
gactgctcttcctgctcttc

SEQ ID NO: 5928 - RNA, 20 nt, Homo sapiens
  source 1..20: mol_type = genomic RNA
actgctcttcctgctcttca

SEQ ID NO: 5929 - RNA, 20 nt, Homo sapiens
  source 1..20: mol_type = genomic RNA
ctgctcttcctgctcttcag

SEQ ID NO: 5930 - RNA, 20 nt, Homo sapiens
  source 1..20: mol_type = genomic RNA
tgctcttcctgctcttcagc

SEQ ID NO: 5931 - RNA, 20 nt, Homo sapiens
  source 1..20: mol_type = genomic RNA
gctcttcctgctcttcagca

SEQ ID NO: 5932 - RNA, 20 nt, Homo sapiens
  source 1..20: mol_type = genomic RNA
ctcttcctgctcttcagcag

SEQ ID NO: 5933 - RNA, 20 nt, Homo sapiens
  source 1..20: mol_type = genomic RNA
tcttcctgctcttcagcagc

SEQ ID NO: 5934 - RNA, 20 nt, Homo sapiens
  source 1..20: mol_type = genomic RNA
cttcctgctcttcagcagcc

SEQ ID NO: 5935 - RNA, 20 nt, Homo sapiens
  source 1..20: mol_type = genomic RNA
ttcctgctcttcagcagcct

SEQ ID NO: 5936 - RNA, 20 nt, Homo sapiens
  source 1..20: mol_type = genomic RNA
tcctgctcttcagcagcctt

SEQ ID NO: 5937 - RNA, 20 nt, Homo sapiens
  source 1..20: mol_type = genomic RNA
cctgctcttcagcagccttc

SEQ ID NO: 5938 - RNA, 20 nt, Homo sapiens
  source 1..20: mol_type = genomic RNA
ctgctcttcagcagccttcg

SEQ ID NO: 5939 - RNA, 20 nt, Homo sapiens
  source 1..20: mol_type = genomic RNA
tgctcttcagcagccttcga

SEQ ID NO: 5940 - RNA, 20 nt, Homo sapiens
  source 1..20: mol_type = genomic RNA
gctcttcagcagccttcgag

SEQ ID NO: 5941 - RNA, 20 nt, Homo sapiens
  source 1..20: mol_type = genomic RNA
ctcttcagcagccttcgagc

SEQ ID NO: 5942 - RNA, 20 nt, Homo sapiens
  source 1..20: mol_type = genomic RNA
tcttcagcagccttcgagct

SEQ ID NO: 5943 - RNA, 20 nt, Homo sapiens
  source 1..20: mol_type = genomic RNA
cttcagcagccttcgagctg

SEQ ID NO: 5944 - RNA, 20 nt, Homo sapiens
  source 1..20: mol_type = genomic RNA
ttcagcagccttcgagctga

SEQ ID NO: 5945 - RNA, 20 nt, Homo sapiens
  source 1..20: mol_type = genomic RNA
tcagcagccttcgagctgat

SEQ ID NO: 5946 - RNA, 20 nt, Homo sapiens
  source 1..20: mol_type = genomic RNA
cagcagccttcgagctgata

SEQ ID NO: 5947 - RNA, 20 nt, Homo sapiens
  source 1..20: mol_type = genomic RNA
agcagccttcgagctgatac

SEQ ID NO: 5948 - RNA, 20 nt, Homo sapiens
  source 1..20: mol_type = genomic RNA
gcagccttcgagctgatact

SEQ ID NO: 5949 - RNA, 20 nt, Homo sapiens
  source 1..20: mol_type = genomic RNA
cagccttcgagctgatactc

SEQ ID NO: 5950 - RNA, 20 nt, Homo sapiens
  source 1..20: mol_type = genomic RNA
agccttcgagctgatactca

SEQ ID NO: 5951 - RNA, 20 nt, Homo sapiens
  source 1..20: mol_type = genomic RNA
gccttcgagctgatactcag

SEQ ID NO: 5952 - RNA, 20 nt, Homo sapiens
  source 1..20: mol_type = genomic RNA
ccttcgagctgatactcagg

SEQ ID NO: 5953 - RNA, 20 nt, Homo sapiens
  source 1..20: mol_type = genomic RNA
cttcgagctgatactcagga

SEQ ID NO: 5954 - RNA, 20 nt, Homo sapiens
  source 1..20: mol_type = genomic RNA
ttcgagctgatactcaggag

SEQ ID NO: 5955 - RNA, 20 nt, Homo sapiens
  source 1..20: mol_type = genomic RNA
tcgagctgatactcaggaga

SEQ ID NO: 5956 - RNA, 20 nt, Homo sapiens
  source 1..20: mol_type = genomic RNA
cgagctgatactcaggagaa

SEQ ID NO: 5957 - RNA, 20 nt, Homo sapiens
  source 1..20: mol_type = genomic RNA
gagctgatactcaggagaag

SEQ ID NO: 5958 - RNA, 20 nt, Homo sapiens
  source 1..20: mol_type = genomic RNA
agctgatactcaggagaagg

SEQ ID NO: 5959 - RNA, 20 nt, Homo sapiens
  source 1..20: mol_type = genomic RNA
gctgatactcaggagaagga

SEQ ID NO: 5960 - RNA, 20 nt, Homo sapiens
  source 1..20: mol_type = genomic RNA
ctgatactcaggagaaggaa

SEQ ID NO: 5961 - RNA, 20 nt, Homo sapiens
  source 1..20: mol_type = genomic RNA
tgatactcaggagaaggaag

SEQ ID NO: 5962 - RNA, 20 nt, Homo sapiens
  source 1..20: mol_type = genomic RNA
gatactcaggagaaggaagt

SEQ ID NO: 5963 - RNA, 20 nt, Homo sapiens
  source 1..20: mol_type = genomic RNA
atactcaggagaaggaagtc

SEQ ID NO: 5964 - RNA, 20 nt, Homo sapiens
  source 1..20: mol_type = genomic RNA
tactcaggagaaggaagtca

SEQ ID NO: 5965 - RNA, 20 nt, Homo sapiens
  source 1..20: mol_type = genomic RNA
actcaggagaaggaagtcag

SEQ ID NO: 5966 - RNA, 20 nt, Homo sapiens
  source 1..20: mol_type = genomic RNA
ctcaggagaaggaagtcaga

SEQ ID NO: 5967 - RNA, 20 nt, Homo sapiens
  source 1..20: mol_type = genomic RNA
tcaggagaaggaagtcagag

SEQ ID NO: 5968 - RNA, 20 nt, Homo sapiens
  source 1..20: mol_type = genomic RNA
caggagaaggaagtcagagc

SEQ ID NO: 5969 - RNA, 20 nt, Homo sapiens
  source 1..20: mol_type = genomic RNA
aggagaaggaagtcagagcg

SEQ ID NO: 5970 - RNA, 20 nt, Homo sapiens
  source 1..20: mol_type = genomic RNA
ggagaaggaagtcagagcga

SEQ ID NO: 5971 - RNA, 20 nt, Homo sapiens
  source 1..20: mol_type = genomic RNA
gagaaggaagtcagagcgat

SEQ ID NO: 5972 - RNA, 20 nt, Homo sapiens
  source 1..20: mol_type = genomic RNA
agaaggaagtcagagcgatg

SEQ ID NO: 5973 - RNA, 20 nt, Homo sapiens
  source 1..20: mol_type = genomic RNA
gaaggaagtcagagcgatgg

SEQ ID NO: 5974 - RNA, 20 nt, Homo sapiens
  source 1..20: mol_type = genomic RNA
aaggaagtcagagcgatggt

SEQ ID NO: 5975 - RNA, 20 nt, Homo sapiens
  source 1..20: mol_type = genomic RNA
aggaagtcagagcgatggta

SEQ ID NO: 5976 - RNA, 20 nt, Homo sapiens
  source 1..20: mol_type = genomic RNA
ggaagtcagagcgatggtag

SEQ ID NO: 5977 - RNA, 20 nt, Homo sapiens
  source 1..20: mol_type = genomic RNA
gaagtcagagcgatggtagg

SEQ ID NO: 5978 - RNA, 20 nt, Homo sapiens
  source 1..20: mol_type = genomic RNA
aagtcagagcgatggtaggc

SEQ ID NO: 5979 - RNA, 20 nt, Homo sapiens
  source 1..20: mol_type = genomic RNA
agtcagagcgatggtaggca

SEQ ID NO: 5980 - RNA, 20 nt, Homo sapiens
  source 1..20: mol_type = genomic RNA
gtcagagcgatggtaggcag

SEQ ID NO: 5981 - RNA, 20 nt, Homo sapiens
  source 1..20: mol_type = genomic RNA
tcagagcgatggtaggcagc

SEQ ID NO: 5982 - RNA, 20 nt, Homo sapiens
  source 1..20: mol_type = genomic RNA
cagagcgatggtaggcagcg

SEQ ID NO: 5983 - RNA, 20 nt, Homo sapiens
  source 1..20: mol_type = genomic RNA
agagcgatggtaggcagcga

SEQ ID NO: 5984 - RNA, 20 nt, Homo sapiens
  source 1..20: mol_type = genomic RNA
gagcgatggtaggcagcgac

SEQ ID NO: 5985 - RNA, 20 nt, Homo sapiens
  source 1..20: mol_type = genomic RNA
agcgatggtaggcagcgacg

SEQ ID NO: 5986 - RNA, 20 nt, Homo sapiens
  source 1..20: mol_type = genomic RNA
gcgatggtaggcagcgacgt

SEQ ID NO: 5987 - RNA, 20 nt, Homo sapiens
  source 1..20: mol_type = genomic RNA
cgatggtaggcagcgacgtg

SEQ ID NO: 5988 - RNA, 20 nt, Homo sapiens
  source 1..20: mol_type = genomic RNA
gatggtaggcagcgacgtgg

SEQ ID NO: 5989 - RNA, 20 nt, Homo sapiens
  source 1..20: mol_type = genomic RNA
atggtaggcagcgacgtgga

SEQ ID NO: 5990 - RNA, 20 nt, Homo sapiens
  source 1..20: mol_type = genomic RNA
tggtaggcagcgacgtggag

SEQ ID NO: 5991 - RNA, 20 nt, Homo sapiens
  source 1..20: mol_type = genomic RNA
ggtaggcagcgacgtggagc

SEQ ID NO: 5992 - RNA, 20 nt, Homo sapiens
  source 1..20: mol_type = genomic RNA
gtaggcagcgacgtggagct

SEQ ID NO: 5993 - RNA, 20 nt, Homo sapiens
  source 1..20: mol_type = genomic RNA
taggcagcgacgtggagctc

SEQ ID NO: 5994 - RNA, 20 nt, Homo sapiens
  source 1..20: mol_type = genomic RNA
aggcagcgacgtggagctca

SEQ ID NO: 5995 - RNA, 20 nt, Homo sapiens
  source 1..20: mol_type = genomic RNA
ggcagcgacgtggagctcag

SEQ ID NO: 5996 - RNA, 20 nt, Homo sapiens
  source 1..20: mol_type = genomic RNA
gcagcgacgtggagctcagc

SEQ ID NO: 5997 - RNA, 20 nt, Homo sapiens
  source 1..20: mol_type = genomic RNA
cagcgacgtggagctcagct

SEQ ID NO: 5998 - RNA, 20 nt, Homo sapiens
  source 1..20: mol_type = genomic RNA
agcgacgtggagctcagctg

SEQ ID NO: 5999 - RNA, 20 nt, Homo sapiens
  source 1..20: mol_type = genomic RNA
gcgacgtggagctcagctgc

SEQ ID NO: 6000 - RNA, 20 nt, Homo sapiens
  source 1..20: mol_type = genomic RNA
cgacgtggagctcagctgcg

SEQ ID NO: 6001 - RNA, 20 nt, Homo sapiens
  source 1..20: mol_type = genomic RNA
gacgtggagctcagctgcgc

SEQ ID NO: 6002 - RNA, 20 nt, Homo sapiens
  source 1..20: mol_type = genomic RNA
acgtggagctcagctgcgct

SEQ ID NO: 6003 - RNA, 20 nt, Homo sapiens
  source 1..20: mol_type = genomic RNA
cgtggagctcagctgcgctt

SEQ ID NO: 6004 - RNA, 20 nt, Homo sapiens
  source 1..20: mol_type = genomic RNA
gtggagctcagctgcgcttg

SEQ ID NO: 6005 - RNA, 20 nt, Homo sapiens
  source 1..20: mol_type = genomic RNA
tggagctcagctgcgcttgc

SEQ ID NO: 6006 - RNA, 20 nt, Homo sapiens
  source 1..20: mol_type = genomic RNA
ggagctcagctgcgcttgcc

SEQ ID NO: 6007 - RNA, 20 nt, Homo sapiens
  source 1..20: mol_type = genomic RNA
gagctcagctgcgcttgccc

SEQ ID NO: 6008 - RNA, 20 nt, Homo sapiens
  source 1..20: mol_type = genomic RNA
agctcagctgcgcttgccct

SEQ ID NO: 6009 - RNA, 20 nt, Homo sapiens
  source 1..20: mol_type = genomic RNA
gctcagctgcgcttgccctg

SEQ ID NO: 6010 - RNA, 20 nt, Homo sapiens
  source 1..20: mol_type = genomic RNA
ctcagctgcgcttgccctga

SEQ ID NO: 6011 - RNA, 20 nt, Homo sapiens
  source 1..20: mol_type = genomic RNA
tcagctgcgcttgccctgaa

SEQ ID NO: 6012 - RNA, 20 nt, Homo sapiens
  source 1..20: mol_type = genomic RNA
cagctgcgcttgccctgaag

SEQ ID NO: 6013 - RNA, 20 nt, Homo sapiens
  source 1..20: mol_type = genomic RNA
agctgcgcttgccctgaagg

SEQ ID NO: 6014 - RNA, 20 nt, Homo sapiens
  source 1..20: mol_type = genomic RNA
gctgcgcttgccctgaagga

SEQ ID NO: 6015 - RNA, 20 nt, Homo sapiens
  source 1..20: mol_type = genomic RNA
ctgcgcttgccctgaaggaa

SEQ ID NO: 6016 - RNA, 20 nt, Homo sapiens
  source 1..20: mol_type = genomic RNA
tgcgcttgccctgaaggaag

SEQ ID NO: 6017 - RNA, 20 nt, Homo sapiens
  source 1..20: mol_type = genomic RNA
gcgcttgccctgaaggaagc

SEQ ID NO: 6018 - RNA, 20 nt, Homo sapiens
  source 1..20: mol_type = genomic RNA
cgcttgccctgaaggaagcc

SEQ ID NO: 6019 - RNA, 20 nt, Homo sapiens
  source 1..20: mol_type = genomic RNA
gcttgccctgaaggaagccg

SEQ ID NO: 6020 - RNA, 20 nt, Homo sapiens
  source 1..20: mol_type = genomic RNA
cttgccctgaaggaagccgt

SEQ ID NO: 6021 - RNA, 20 nt, Homo sapiens
  source 1..20: mol_type = genomic RNA
ttgccctgaaggaagccgtt

SEQ ID NO: 6022 - RNA, 20 nt, Homo sapiens
  source 1..20: mol_type = genomic RNA
tgccctgaaggaagccgttt

SEQ ID NO: 6023 - RNA, 20 nt, Homo sapiens
  source 1..20: mol_type = genomic RNA
gccctgaaggaagccgtttt

SEQ ID NO: 6024 - RNA, 20 nt, Homo sapiens
  source 1..20: mol_type = genomic RNA
ccctgaaggaagccgttttg

SEQ ID NO: 6025 - RNA, 20 nt, Homo sapiens
  source 1..20: mol_type = genomic RNA
cctgaaggaagccgttttga

SEQ ID NO: 6026 - RNA, 20 nt, Homo sapiens
  source 1..20: mol_type = genomic RNA
ctgaaggaagccgttttgat

SEQ ID NO: 6027 - RNA, 20 nt, Homo sapiens
  source 1..20: mol_type = genomic RNA
tgaaggaagccgttttgatt

SEQ ID NO: 6028 - RNA, 20 nt, Homo sapiens
  source 1..20: mol_type = genomic RNA
gaaggaagccgttttgattt

SEQ ID NO: 6029 - RNA, 20 nt, Homo sapiens
  source 1..20: mol_type = genomic RNA
aaggaagccgttttgattta

SEQ ID NO: 6030 - RNA, 20 nt, Homo sapiens
  source 1..20: mol_type = genomic RNA
aggaagccgttttgatttaa

SEQ ID NO: 6031 - RNA, 20 nt, Homo sapiens
  source 1..20: mol_type = genomic RNA
ggaagccgttttgatttaaa

SEQ ID NO: 6032 - RNA, 20 nt, Homo sapiens
  source 1..20: mol_type = genomic RNA
gaagccgttttgatttaaat

SEQ ID NO: 6033 - RNA, 20 nt, Homo sapiens
  source 1..20: mol_type = genomic RNA
aagccgttttgatttaaatg

SEQ ID NO: 6034 - RNA, 20 nt, Homo sapiens
  source 1..20: mol_type = genomic RNA
agccgttttgatttaaatga

SEQ ID NO: 6035 - RNA, 20 nt, Homo sapiens
  source 1..20: mol_type = genomic RNA
gccgttttgatttaaatgat

SEQ ID NO: 6036 - RNA, 20 nt, Homo sapiens
  source 1..20: mol_type = genomic RNA
ccgttttgatttaaatgatg

SEQ ID NO: 6037 - RNA, 20 nt, Homo sapiens
  source 1..20: mol_type = genomic RNA
cgttttgatttaaatgatgt

SEQ ID NO: 6038 - RNA, 20 nt, Homo sapiens
  source 1..20: mol_type = genomic RNA
gttttgatttaaatgatgtt

SEQ ID NO: 6039 - RNA, 20 nt, Homo sapiens
  source 1..20: mol_type = genomic RNA
ttttgatttaaatgatgttt

SEQ ID NO: 6040 - RNA, 20 nt, Homo sapiens
  source 1..20: mol_type = genomic RNA
tttgatttaaatgatgttta

SEQ ID NO: 6041 - RNA, 20 nt, Homo sapiens
  source 1..20: mol_type = genomic RNA
ttgatttaaatgatgtttac

SEQ ID NO: 6042 - RNA, 20 nt, Homo sapiens
  source 1..20: mol_type = genomic RNA
tgatttaaatgatgtttacg

SEQ ID NO: 6043 - RNA, 20 nt, Homo sapiens
  source 1..20: mol_type = genomic RNA
gatttaaatgatgtttacgt

SEQ ID NO: 6044 - RNA, 20 nt, Homo sapiens
  source 1..20: mol_type = genomic RNA
atttaaatgatgtttacgta

SEQ ID NO: 6045 - RNA, 20 nt, Homo sapiens
  source 1..20: mol_type = genomic RNA
tttaaatgatgtttacgtat

SEQ ID NO: 6046 - RNA, 20 nt, Homo sapiens
  source 1..20: mol_type = genomic RNA
ttaaatgatgtttacgtata

SEQ ID NO: 6047 - RNA, 20 nt, Homo sapiens
  source 1..20: mol_type = genomic RNA
taaatgatgtttacgtatat

SEQ ID NO: 6048 - RNA, 20 nt, Homo sapiens
  source 1..20: mol_type = genomic RNA
aaatgatgtttacgtatatt

SEQ ID NO: 6049 - RNA, 20 nt, Homo sapiens
  source 1..20: mol_type = genomic RNA
aatgatgtttacgtatattg

SEQ ID NO: 6050 - RNA, 20 nt, Homo sapiens
  source 1..20: mol_type = genomic RNA
atgatgtttacgtatattgg

SEQ ID NO: 6051 - RNA, 20 nt, Homo sapiens
  source 1..20: mol_type = genomic RNA
tgatgtttacgtatattggc

SEQ ID NO: 6052 - RNA, 20 nt, Homo sapiens
  source 1..20: mol_type = genomic RNA
gatgtttacgtatattggca

SEQ ID NO: 6053 - RNA, 20 nt, Homo sapiens
  source 1..20: mol_type = genomic RNA
atgtttacgtatattggcaa

SEQ ID NO: 6054 - RNA, 20 nt, Homo sapiens
  source 1..20: mol_type = genomic RNA
tgtttacgtatattggcaaa

SEQ ID NO: 6055 - RNA, 20 nt, Homo sapiens
  source 1..20: mol_type = genomic RNA
gtttacgtatattggcaaac

SEQ ID NO: 6056 - RNA, 20 nt, Homo sapiens
  source 1..20: mol_type = genomic RNA
tttacgtatattggcaaacc

SEQ ID NO: 6057 - RNA, 20 nt, Homo sapiens
  source 1..20: mol_type = genomic RNA
ttacgtatattggcaaacca

SEQ ID NO: 6058 - RNA, 20 nt, Homo sapiens
  source 1..20: mol_type = genomic RNA
tacgtatattggcaaaccag

SEQ ID NO: 6059 - RNA, 20 nt, Homo sapiens
  source 1..20: mol_type = genomic RNA
acgtatattggcaaaccagt

SEQ ID NO: 6060 - RNA, 20 nt, Homo sapiens
  source 1..20: mol_type = genomic RNA
cgtatattggcaaaccagtg

SEQ ID NO: 6061 - RNA, 20 nt, Homo sapiens
  source 1..20: mol_type = genomic RNA
gtatattggcaaaccagtga

SEQ ID NO: 6062 - RNA, 20 nt, Homo sapiens
  source 1..20: mol_type = genomic RNA
tatattggcaaaccagtgag

SEQ ID NO: 6063 - RNA, 20 nt, Homo sapiens
  source 1..20: mol_type = genomic RNA
atattggcaaaccagtgagt

SEQ ID NO: 6064 - RNA, 20 nt, Homo sapiens
  source 1..20: mol_type = genomic RNA
tattggcaaaccagtgagtc

SEQ ID NO: 6065 - RNA, 20 nt, Homo sapiens
  source 1..20: mol_type = genomic RNA
attggcaaaccagtgagtcg

SEQ ID NO: 6066 - RNA, 20 nt, Homo sapiens
  source 1..20: mol_type = genomic RNA
ttggcaaaccagtgagtcga

SEQ ID NO: 6067 - RNA, 20 nt, Homo sapiens
  source 1..20: mol_type = genomic RNA
tggcaaaccagtgagtcgaa

SEQ ID NO: 6068 - RNA, 20 nt, Homo sapiens
  source 1..20: mol_type = genomic RNA
ggcaaaccagtgagtcgaaa

SEQ ID NO: 6069 - RNA, 20 nt, Homo sapiens
  source 1..20: mol_type = genomic RNA
gcaaaccagtgagtcgaaaa

SEQ ID NO: 6070 - RNA, 20 nt, Homo sapiens
  source 1..20: mol_type = genomic RNA
caaaccagtgagtcgaaaac

SEQ ID NO: 6071 - RNA, 20 nt, Homo sapiens
  source 1..20: mol_type = genomic RNA
aaaccagtgagtcgaaaacc

SEQ ID NO: 6072 - RNA, 20 nt, Homo sapiens
  source 1..20: mol_type = genomic RNA
aaccagtgagtcgaaaaccg

SEQ ID NO: 6073 - RNA, 20 nt, Homo sapiens
  source 1..20: mol_type = genomic RNA
accagtgagtcgaaaaccgt

SEQ ID NO: 6074 - RNA, 20 nt, Homo sapiens
  source 1..20: mol_type = genomic RNA
ccagtgagtcgaaaaccgtg

SEQ ID NO: 6075 - RNA, 20 nt, Homo sapiens
  source 1..20: mol_type = genomic RNA
cagtgagtcgaaaaccgtgg

SEQ ID NO: 6076 - RNA, 20 nt, Homo sapiens
  source 1..20: mol_type = genomic RNA
agtgagtcgaaaaccgtggt

SEQ ID NO: 6077 - RNA, 20 nt, Homo sapiens
  source 1..20: mol_type = genomic RNA
gtgagtcgaaaaccgtggtg

SEQ ID NO: 6078 - RNA, 20 nt, Homo sapiens
  source 1..20: mol_type = genomic RNA
tgagtcgaaaaccgtggtga

SEQ ID NO: 6079 - RNA, 20 nt, Homo sapiens
  source 1..20: mol_type = genomic RNA
gagtcgaaaaccgtggtgac

SEQ ID NO: 6080 - RNA, 20 nt, Homo sapiens
  source 1..20: mol_type = genomic RNA
agtcgaaaaccgtggtgacc

SEQ ID NO: 6081 - RNA, 20 nt, Homo sapiens
  source 1..20: mol_type = genomic RNA
gtcgaaaaccgtggtgacct

SEQ ID NO: 6082 - RNA, 20 nt, Homo sapiens
  source 1..20: mol_type = genomic RNA
tcgaaaaccgtggtgaccta

SEQ ID NO: 6083 - RNA, 20 nt, Homo sapiens
  source 1..20: mol_type = genomic RNA
cgaaaaccgtggtgacctac

SEQ ID NO: 6084 - RNA, 20 nt, Homo sapiens
  source 1..20: mol_type = genomic RNA
gaaaaccgtggtgacctacc

SEQ ID NO: 6085 - RNA, 20 nt, Homo sapiens
  source 1..20: mol_type = genomic RNA
aaaaccgtggtgacctacca

SEQ ID NO: 6086 - RNA, 20 nt, Homo sapiens
  source 1..20: mol_type = genomic RNA
aaaccgtggtgacctaccac

SEQ ID NO: 6087 - RNA, 20 nt, Homo sapiens
  source 1..20: mol_type = genomic RNA
aaccgtggtgacctaccaca

SEQ ID NO: 6088 - RNA, 20 nt, Homo sapiens
  source 1..20: mol_type = genomic RNA
accgtggtgacctaccacat

SEQ ID NO: 6089 - RNA, 20 nt, Homo sapiens
  source 1..20: mol_type = genomic RNA
ccgtggtgacctaccacatc

SEQ ID NO: 6090 - RNA, 20 nt, Homo sapiens
  source 1..20: mol_type = genomic RNA
cgtggtgacctaccacatcc

SEQ ID NO: 6091 - RNA, 20 nt, Homo sapiens
  source 1..20: mol_type = genomic RNA
gtggtgacctaccacatccc

SEQ ID NO: 6092 - RNA, 20 nt, Homo sapiens
  source 1..20: mol_type = genomic RNA
tggtgacctaccacatccca

SEQ ID NO: 6093 - RNA, 20 nt, Homo sapiens
  source 1..20: mol_type = genomic RNA
ggtgacctaccacatcccac

SEQ ID NO: 6094 - RNA, 20 nt, Homo sapiens
  source 1..20: mol_type = genomic RNA
gtgacctaccacatcccaca

SEQ ID NO: 6095 - RNA, 20 nt, Homo sapiens
  source 1..20: mol_type = genomic RNA
tgacctaccacatcccacag

SEQ ID NO: 6096 - RNA, 20 nt, Homo sapiens
  source 1..20: mol_type = genomic RNA
gacctaccacatcccacaga

SEQ ID NO: 6097 - RNA, 20 nt, Homo sapiens
  source 1..20: mol_type = genomic RNA
acctaccacatcccacagaa

SEQ ID NO: 6098 - RNA, 20 nt, Homo sapiens
  source 1..20: mol_type = genomic RNA
cctaccacatcccacagaac

SEQ ID NO: 6099 - RNA, 20 nt, Homo sapiens
  source 1..20: mol_type = genomic RNA
ctaccacatcccacagaaca

SEQ ID NO: 6100 - RNA, 20 nt, Homo sapiens
  source 1..20: mol_type = genomic RNA
taccacatcccacagaacag

SEQ ID NO: 6101 - RNA, 20 nt, Homo sapiens
  source 1..20: mol_type = genomic RNA
accacatcccacagaacagc

SEQ ID NO: 6102 - RNA, 20 nt, Homo sapiens
  source 1..20: mol_type = genomic RNA
ccacatcccacagaacagct

SEQ ID NO: 6103 - RNA, 20 nt, Homo sapiens
  source 1..20: mol_type = genomic RNA
cacatcccacagaacagctc

SEQ ID NO: 6104 - RNA, 20 nt, Homo sapiens
  source 1..20: mol_type = genomic RNA
acatcccacagaacagctcc

SEQ ID NO: 6105 - RNA, 20 nt, Homo sapiens
  source 1..20: mol_type = genomic RNA
catcccacagaacagctcct

SEQ ID NO: 6106 - RNA, 20 nt, Homo sapiens
  source 1..20: mol_type = genomic RNA
atcccacagaacagctcctt

SEQ ID NO: 6107 - RNA, 20 nt, Homo sapiens
  source 1..20: mol_type = genomic RNA
tcccacagaacagctccttg

SEQ ID NO: 6108 - RNA, 20 nt, Homo sapiens
  source 1..20: mol_type = genomic RNA
cccacagaacagctccttgg

SEQ ID NO: 6109 - RNA, 20 nt, Homo sapiens
  source 1..20: mol_type = genomic RNA
ccacagaacagctccttgga

SEQ ID NO: 6110 - RNA, 20 nt, Homo sapiens
  source 1..20: mol_type = genomic RNA
cacagaacagctccttggaa

SEQ ID NO: 6111 - RNA, 20 nt, Homo sapiens
  source 1..20: mol_type = genomic RNA
acagaacagctccttggaaa

SEQ ID NO: 6112 - RNA, 20 nt, Homo sapiens
  source 1..20: mol_type = genomic RNA
cagaacagctccttggaaaa

SEQ ID NO: 6113 - RNA, 20 nt, Homo sapiens
  source 1..20: mol_type = genomic RNA
agaacagctccttggaaaac

SEQ ID NO: 6114 - RNA, 20 nt, Homo sapiens
  source 1..20: mol_type = genomic RNA
gaacagctccttggaaaacg

SEQ ID NO: 6115 - RNA, 20 nt, Homo sapiens
  source 1..20: mol_type = genomic RNA
aacagctccttggaaaacgt

SEQ ID NO: 6116 - RNA, 20 nt, Homo sapiens
  source 1..20: mol_type = genomic RNA
acagctccttggaaaacgtg

SEQ ID NO: 6117 - RNA, 20 nt, Homo sapiens
  source 1..20: mol_type = genomic RNA
cagctccttggaaaacgtgg

SEQ ID NO: 6118 - RNA, 20 nt, Homo sapiens
  source 1..20: mol_type = genomic RNA
agctccttggaaaacgtgga

SEQ ID NO: 6119 - RNA, 20 nt, Homo sapiens
  source 1..20: mol_type = genomic RNA
gctccttggaaaacgtggac

SEQ ID NO: 6120 - RNA, 20 nt, Homo sapiens
  source 1..20: mol_type = genomic RNA
ctccttggaaaacgtggaca

SEQ ID NO: 6121 - RNA, 20 nt, Homo sapiens
  source 1..20: mol_type = genomic RNA
tccttggaaaacgtggacag

SEQ ID NO: 6122 - RNA, 20 nt, Homo sapiens
  source 1..20: mol_type = genomic RNA
ccttggaaaacgtggacagc

SEQ ID NO: 6123 - RNA, 20 nt, Homo sapiens
  source 1..20: mol_type = genomic RNA
cttggaaaacgtggacagcc

SEQ ID NO: 6124 - RNA, 20 nt, Homo sapiens
  source 1..20: mol_type = genomic RNA
ttggaaaacgtggacagccg

SEQ ID NO: 6125 - RNA, 20 nt, Homo sapiens
  source 1..20: mol_type = genomic RNA
tggaaaacgtggacagccgc

SEQ ID NO: 6126 - RNA, 20 nt, Homo sapiens
  source 1..20: mol_type = genomic RNA
ggaaaacgtggacagccgct

SEQ ID NO: 6127 - RNA, 20 nt, Homo sapiens
  source 1..20: mol_type = genomic RNA
gaaaacgtggacagccgcta

SEQ ID NO: 6128 - RNA, 20 nt, Homo sapiens
  source 1..20: mol_type = genomic RNA
aaaacgtggacagccgctac

SEQ ID NO: 6129 - RNA, 20 nt, Homo sapiens
  source 1..20: mol_type = genomic RNA
aaacgtggacagccgctacc

SEQ ID NO: 6130 - RNA, 20 nt, Homo sapiens
  source 1..20: mol_type = genomic RNA
aacgtggacagccgctaccg

SEQ ID NO: 6131 - RNA, 20 nt, Homo sapiens
  source 1..20: mol_type = genomic RNA
acgtggacagccgctaccgg

SEQ ID NO: 6132 - RNA, 20 nt, Homo sapiens
  source 1..20: mol_type = genomic RNA
cgtggacagccgctaccgga

SEQ ID NO: 6133 - RNA, 20 nt, Homo sapiens
  source 1..20: mol_type = genomic RNA
gtggacagccgctaccggaa

SEQ ID NO: 6134 - RNA, 20 nt, Homo sapiens
  source 1..20: mol_type = genomic RNA
tggacagccgctaccggaac

SEQ ID NO: 6135 - RNA, 20 nt, Homo sapiens
  source 1..20: mol_type = genomic RNA
ggacagccgctaccggaacc

SEQ ID NO: 6136 - RNA, 20 nt, Homo sapiens
  source 1..20: mol_type = genomic RNA
gacagccgctaccggaaccg

SEQ ID NO: 6137 - RNA, 20 nt, Homo sapiens
  source 1..20: mol_type = genomic RNA
acagccgctaccggaaccga

SEQ ID NO: 6138 - RNA, 20 nt, Homo sapiens
  source 1..20: mol_type = genomic RNA
cagccgctaccggaaccgag

SEQ ID NO: 6139 - RNA, 20 nt, Homo sapiens
  source 1..20: mol_type = genomic RNA
agccgctaccggaaccgagc

SEQ ID NO: 6140 - RNA, 20 nt, Homo sapiens
  source 1..20: mol_type = genomic RNA
gccgctaccggaaccgagcc

SEQ ID NO: 6141 - RNA, 20 nt, Homo sapiens
  source 1..20: mol_type = genomic RNA
ccgctaccggaaccgagccc

SEQ ID NO: 6142 - RNA, 20 nt, Homo sapiens
  source 1..20: mol_type = genomic RNA
cgctaccggaaccgagccct

SEQ ID NO: 6143 - RNA, 20 nt, Homo sapiens
  source 1..20: mol_type = genomic RNA
gctaccggaaccgagccctg

SEQ ID NO: 6144 - RNA, 20 nt, Homo sapiens
  source 1..20: mol_type = genomic RNA
ctaccggaaccgagccctga

SEQ ID NO: 6145 - RNA, 20 nt, Homo sapiens
  source 1..20: mol_type = genomic RNA
taccggaaccgagccctgat

SEQ ID NO: 6146 - RNA, 20 nt, Homo sapiens
  source 1..20: mol_type = genomic RNA
accggaaccgagccctgatg

SEQ ID NO: 6147 - RNA, 20 nt, Homo sapiens
  source 1..20: mol_type = genomic RNA
ccggaaccgagccctgatgt

SEQ ID NO: 6148 - RNA, 20 nt, Homo sapiens
  source 1..20: mol_type = genomic RNA
cggaaccgagccctgatgtc

SEQ ID NO: 6149 - RNA, 20 nt, Homo sapiens
  source 1..20: mol_type = genomic RNA
ggaaccgagccctgatgtca

SEQ ID NO: 6150 - RNA, 20 nt, Homo sapiens
  source 1..20: mol_type = genomic RNA
gaaccgagccctgatgtcac

SEQ ID NO: 6151 - RNA, 20 nt, Homo sapiens
  source 1..20: mol_type = genomic RNA
aaccgagccctgatgtcacc

SEQ ID NO: 6152 - RNA, 20 nt, Homo sapiens
  source 1..20: mol_type = genomic RNA
accgagccctgatgtcaccg

SEQ ID NO: 6153 - RNA, 20 nt, Homo sapiens
  source 1..20: mol_type = genomic RNA
ccgagccctgatgtcaccgg

SEQ ID NO: 6154 - RNA, 20 nt, Homo sapiens
  source 1..20: mol_type = genomic RNA
cgagccctgatgtcaccggc

SEQ ID NO: 6155 - RNA, 20 nt, Homo sapiens
  source 1..20: mol_type = genomic RNA
gagccctgatgtcaccggcc

SEQ ID NO: 6156 - RNA, 20 nt, Homo sapiens
  source 1..20: mol_type = genomic RNA
agccctgatgtcaccggccg

SEQ ID NO: 6157 - RNA, 20 nt, Homo sapiens
  source 1..20: mol_type = genomic RNA
gccctgatgtcaccggccgg

SEQ ID NO: 6158 - RNA, 20 nt, Homo sapiens
  source 1..20: mol_type = genomic RNA
ccctgatgtcaccggccggc

SEQ ID NO: 6159 - RNA, 20 nt, Homo sapiens
  source 1..20: mol_type = genomic RNA
cctgatgtcaccggccggca

SEQ ID NO: 6160 - RNA, 20 nt, Homo sapiens
  source 1..20: mol_type = genomic RNA
ctgatgtcaccggccggcat

SEQ ID NO: 6161 - RNA, 20 nt, Homo sapiens
  source 1..20: mol_type = genomic RNA
tgatgtcaccggccggcatg

SEQ ID NO: 6162 - RNA, 20 nt, Homo sapiens
  source 1..20: mol_type = genomic RNA
gatgtcaccggccggcatgc

SEQ ID NO: 6163 - RNA, 20 nt, Homo sapiens
  source 1..20: mol_type = genomic RNA
atgtcaccggccggcatgct

SEQ ID NO: 6164 - RNA, 20 nt, Homo sapiens
  source 1..20: mol_type = genomic RNA
tgtcaccggccggcatgctg

SEQ ID NO: 6165 - RNA, 20 nt, Homo sapiens
  source 1..20: mol_type = genomic RNA
gtcaccggccggcatgctgc

SEQ ID NO: 6166 - RNA, 20 nt, Homo sapiens
  source 1..20: mol_type = genomic RNA
tcaccggccggcatgctgcg

SEQ ID NO: 6167 - RNA, 20 nt, Homo sapiens
  source 1..20: mol_type = genomic RNA
caccggccggcatgctgcgg

SEQ ID NO: 6168 - RNA, 20 nt, Homo sapiens
  source 1..20: mol_type = genomic RNA
accggccggcatgctgcggg

SEQ ID NO: 6169 - RNA, 20 nt, Homo sapiens
  source 1..20: mol_type = genomic RNA
ccggccggcatgctgcgggg

SEQ ID NO: 6170 - RNA, 20 nt, Homo sapiens
  source 1..20: mol_type = genomic RNA
cggccggcatgctgcggggc

SEQ ID NO: 6171 - RNA, 20 nt, Homo sapiens
  source 1..20: mol_type = genomic RNA
ggccggcatgctgcggggcg

SEQ ID NO: 6172 - RNA, 20 nt, Homo sapiens
  source 1..20: mol_type = genomic RNA
gccggcatgctgcggggcga

SEQ ID NO: 6173 - RNA, 20 nt, Homo sapiens
  source 1..20: mol_type = genomic RNA
ccggcatgctgcggggcgac

SEQ ID NO: 6174 - RNA, 20 nt, Homo sapiens
  source 1..20: mol_type = genomic RNA
cggcatgctgcggggcgact

SEQ ID NO: 6175 - RNA, 20 nt, Homo sapiens
  source 1..20: mol_type = genomic RNA
ggcatgctgcggggcgactt

SEQ ID NO: 6176 - RNA, 20 nt, Homo sapiens
  source 1..20: mol_type = genomic RNA
gcatgctgcggggcgacttc

SEQ ID NO: 6177 - RNA, 20 nt, Homo sapiens
  source 1..20: mol_type = genomic RNA
catgctgcggggcgacttct

SEQ ID NO: 6178 - RNA, 20 nt, Homo sapiens
  source 1..20: mol_type = genomic RNA
atgctgcggggcgacttctc

SEQ ID NO: 6179 - RNA, 20 nt, Homo sapiens
  source 1..20: mol_type = genomic RNA
tgctgcggggcgacttctcc

SEQ ID NO: 6180 - RNA, 20 nt, Homo sapiens
  source 1..20: mol_type = genomic RNA
gctgcggggcgacttctccc

SEQ ID NO: 6181 - RNA, 20 nt, Homo sapiens
  source 1..20: mol_type = genomic RNA
ctgcggggcgacttctccct

SEQ ID NO: 6182 - RNA, 20 nt, Homo sapiens
  source 1..20: mol_type = genomic RNA
tgcggggcgacttctccctg

SEQ ID NO: 6183 - RNA, 20 nt, Homo sapiens
  source 1..20: mol_type = genomic RNA
gcggggcgacttctccctgc

SEQ ID NO: 6184 - RNA, 20 nt, Homo sapiens
  source 1..20: mol_type = genomic RNA
cggggcgacttctccctgcg

SEQ ID NO: 6185 - RNA, 20 nt, Homo sapiens
  source 1..20: mol_type = genomic RNA
ggggcgacttctccctgcgc

SEQ ID NO: 6186 - RNA, 20 nt, Homo sapiens
  source 1..20: mol_type = genomic RNA
gggcgacttctccctgcgct

SEQ ID NO: 6187 - RNA, 20 nt, Homo sapiens
  source 1..20: mol_type = genomic RNA
ggcgacttctccctgcgctt

SEQ ID NO: 6188 - RNA, 20 nt, Homo sapiens
  source 1..20: mol_type = genomic RNA
gcgacttctccctgcgcttg

SEQ ID NO: 6189 - RNA, 20 nt, Homo sapiens
  source 1..20: mol_type = genomic RNA
cgacttctccctgcgcttgt

SEQ ID NO: 6190 - RNA, 20 nt, Homo sapiens
  source 1..20: mol_type = genomic RNA
gacttctccctgcgcttgtt

SEQ ID NO: 6191 - RNA, 20 nt, Homo sapiens
  source 1..20: mol_type = genomic RNA
acttctccctgcgcttgttc

SEQ ID NO: 6192 - RNA, 20 nt, Homo sapiens
  source 1..20: mol_type = genomic RNA
cttctccctgcgcttgttca

SEQ ID NO: 6193 - RNA, 20 nt, Homo sapiens
  source 1..20: mol_type = genomic RNA
ttctccctgcgcttgttcaa

SEQ ID NO: 6194 - RNA, 20 nt, Homo sapiens
  source 1..20: mol_type = genomic RNA
tctccctgcgcttgttcaac

SEQ ID NO: 6195 - RNA, 20 nt, Homo sapiens
  source 1..20: mol_type = genomic RNA
ctccctgcgcttgttcaacg

SEQ ID NO: 6196 - RNA, 20 nt, Homo sapiens
  source 1..20: mol_type = genomic RNA
tccctgcgcttgttcaacgt

SEQ ID NO: 6197 - RNA, 20 nt, Homo sapiens
  source 1..20: mol_type = genomic RNA
ccctgcgcttgttcaacgtc

SEQ ID NO: 6198 - RNA, 20 nt, Homo sapiens
  source 1..20: mol_type = genomic RNA
cctgcgcttgttcaacgtca

SEQ ID NO: 6199 - RNA, 20 nt, Homo sapiens
  source 1..20: mol_type = genomic RNA
ctgcgcttgttcaacgtcac

SEQ ID NO: 6200 - RNA, 20 nt, Homo sapiens
  source 1..20: mol_type = genomic RNA
tgcgcttgttcaacgtcacc

SEQ ID NO: 6201 - RNA, 20 nt, Homo sapiens
  source 1..20: mol_type = genomic RNA
gcgcttgttcaacgtcaccc

SEQ ID NO: 6202 - RNA, 20 nt, Homo sapiens
  source 1..20: mol_type = genomic RNA
cgcttgttcaacgtcacccc

SEQ ID NO: 6203 - RNA, 20 nt, Homo sapiens
  source 1..20: mol_type = genomic RNA
gcttgttcaacgtcaccccc

SEQ ID NO: 6204 - RNA, 20 nt, Homo sapiens
  source 1..20: mol_type = genomic RNA
cttgttcaacgtcacccccc

SEQ ID NO: 6205 - RNA, 20 nt, Homo sapiens
  source 1..20: mol_type = genomic RNA
ttgttcaacgtcacccccca

SEQ ID NO: 6206 - RNA, 20 nt, Homo sapiens
  source 1..20: mol_type = genomic RNA
tgttcaacgtcaccccccag

SEQ ID NO: 6207 - RNA, 20 nt, Homo sapiens
  source 1..20: mol_type = genomic RNA
gttcaacgtcaccccccagg

SEQ ID NO: 6208 - RNA, 20 nt, Homo sapiens
  source 1..20: mol_type = genomic RNA
ttcaacgtcaccccccagga

SEQ ID NO: 6209 - RNA, 20 nt, Homo sapiens
  source 1..20: mol_type = genomic RNA
tcaacgtcaccccccaggac

SEQ ID NO: 6210 - RNA, 20 nt, Homo sapiens
  source 1..20: mol_type = genomic RNA
caacgtcaccccccaggacg

SEQ ID NO: 6211 - RNA, 20 nt, Homo sapiens
  source 1..20: mol_type = genomic RNA
aacgtcaccccccaggacga

SEQ ID NO: 6212 - RNA, 20 nt, Homo sapiens
  source 1..20: mol_type = genomic RNA
acgtcaccccccaggacgag

SEQ ID NO: 6213 - RNA, 20 nt, Homo sapiens
  source 1..20: mol_type = genomic RNA
cgtcaccccccaggacgagc

SEQ ID NO: 6214 - RNA, 20 nt, Homo sapiens
  source 1..20: mol_type = genomic RNA
gtcaccccccaggacgagca

SEQ ID NO: 6215 - RNA, 20 nt, Homo sapiens
  source 1..20: mol_type = genomic RNA
tcaccccccaggacgagcag

SEQ ID NO: 6216 - RNA, 20 nt, Homo sapiens
  source 1..20: mol_type = genomic RNA
caccccccaggacgagcaga

SEQ ID NO: 6217 - RNA, 20 nt, Homo sapiens
  source 1..20: mol_type = genomic RNA
accccccaggacgagcagaa

SEQ ID NO: 6218 - RNA, 20 nt, Homo sapiens
  source 1..20: mol_type = genomic RNA
ccccccaggacgagcagaag

SEQ ID NO: 6219 - RNA, 20 nt, Homo sapiens
  source 1..20: mol_type = genomic RNA
cccccaggacgagcagaagt

SEQ ID NO: 6220 - RNA, 20 nt, Homo sapiens
  source 1..20: mol_type = genomic RNA
ccccaggacgagcagaagtt

SEQ ID NO: 6221 - RNA, 20 nt, Homo sapiens
  source 1..20: mol_type = genomic RNA
cccaggacgagcagaagttt

SEQ ID NO: 6222 - RNA, 20 nt, Homo sapiens
  source 1..20: mol_type = genomic RNA
ccaggacgagcagaagtttc

SEQ ID NO: 6223 - RNA, 20 nt, Homo sapiens
  source 1..20: mol_type = genomic RNA
caggacgagcagaagtttca

SEQ ID NO: 6224 - RNA, 20 nt, Homo sapiens
  source 1..20: mol_type = genomic RNA
aggacgagcagaagtttcac

SEQ ID NO: 6225 - RNA, 20 nt, Homo sapiens
  source 1..20: mol_type = genomic RNA
ggacgagcagaagtttcact

SEQ ID NO: 6226 - RNA, 20 nt, Homo sapiens
  source 1..20: mol_type = genomic RNA
gacgagcagaagtttcactg

SEQ ID NO: 6227 - RNA, 20 nt, Homo sapiens
  source 1..20: mol_type = genomic RNA
acgagcagaagtttcactgc

SEQ ID NO: 6228 - RNA, 20 nt, Homo sapiens
  source 1..20: mol_type = genomic RNA
cgagcagaagtttcactgcc

SEQ ID NO: 6229 - RNA, 20 nt, Homo sapiens
  source 1..20: mol_type = genomic RNA
gagcagaagtttcactgcct

SEQ ID NO: 6230 - RNA, 20 nt, Homo sapiens
  source 1..20: mol_type = genomic RNA
agcagaagtttcactgcctg

SEQ ID NO: 6231 - RNA, 20 nt, Homo sapiens
  source 1..20: mol_type = genomic RNA
gcagaagtttcactgcctgg

SEQ ID NO: 6232 - RNA, 20 nt, Homo sapiens
  source 1..20: mol_type = genomic RNA
cagaagtttcactgcctggt

SEQ ID NO: 6233 - RNA, 20 nt, Homo sapiens
  source 1..20: mol_type = genomic RNA
agaagtttcactgcctggtg

SEQ ID NO: 6234 - RNA, 20 nt, Homo sapiens
  source 1..20: mol_type = genomic RNA
gaagtttcactgcctggtgt

SEQ ID NO: 6235 - RNA, 20 nt, Homo sapiens
  source 1..20: mol_type = genomic RNA
aagtttcactgcctggtgtt

SEQ ID NO: 6236 - RNA, 20 nt, Homo sapiens
  source 1..20: mol_type = genomic RNA
agtttcactgcctggtgttg

SEQ ID NO: 6237 - RNA, 20 nt, Homo sapiens
  source 1..20: mol_type = genomic RNA
gtttcactgcctggtgttga

SEQ ID NO: 6238 - RNA, 20 nt, Homo sapiens
  source 1..20: mol_type = genomic RNA
tttcactgcctggtgttgag

SEQ ID NO: 6239 - RNA, 20 nt, Homo sapiens
  source 1..20: mol_type = genomic RNA
ttcactgcctggtgttgagc

SEQ ID NO: 6240 - RNA, 20 nt, Homo sapiens
  source 1..20: mol_type = genomic RNA
tcactgcctggtgttgagcc

SEQ ID NO: 6241 - RNA, 20 nt, Homo sapiens
  source 1..20: mol_type = genomic RNA
cactgcctggtgttgagcca

SEQ ID NO: 6242 - RNA, 20 nt, Homo sapiens
  source 1..20: mol_type = genomic RNA
actgcctggtgttgagccaa

SEQ ID NO: 6243 - RNA, 20 nt, Homo sapiens
  source 1..20: mol_type = genomic RNA
ctgcctggtgttgagccaat

SEQ ID NO: 6244 - RNA, 20 nt, Homo sapiens
  source 1..20: mol_type = genomic RNA
tgcctggtgttgagccaatc

SEQ ID NO: 6245 - RNA, 20 nt, Homo sapiens
  source 1..20: mol_type = genomic RNA
gcctggtgttgagccaatcc

SEQ ID NO: 6246 - RNA, 20 nt, Homo sapiens
  source 1..20: mol_type = genomic RNA
cctggtgttgagccaatccc

SEQ ID NO: 6247 - RNA, 20 nt, Homo sapiens
  source 1..20: mol_type = genomic RNA
ctggtgttgagccaatccct

SEQ ID NO: 6248 - RNA, 20 nt, Homo sapiens
  source 1..20: mol_type = genomic RNA
tggtgttgagccaatccctg

SEQ ID NO: 6249 - RNA, 20 nt, Homo sapiens
  source 1..20: mol_type = genomic RNA
ggtgttgagccaatccctgg

SEQ ID NO: 6250 - RNA, 20 nt, Homo sapiens
  source 1..20: mol_type = genomic RNA
gtgttgagccaatccctggg

SEQ ID NO: 6251 - RNA, 20 nt, Homo sapiens
  source 1..20: mol_type = genomic RNA
tgttgagccaatccctggga

SEQ ID NO: 6252 - RNA, 20 nt, Homo sapiens
  source 1..20: mol_type = genomic RNA
gttgagccaatccctgggat

SEQ ID NO: 6253 - RNA, 20 nt, Homo sapiens
  source 1..20: mol_type = genomic RNA
ttgagccaatccctgggatt

SEQ ID NO: 6254 - RNA, 20 nt, Homo sapiens
  source 1..20: mol_type = genomic RNA
tgagccaatccctgggattc

SEQ ID NO: 6255 - RNA, 20 nt, Homo sapiens
  source 1..20: mol_type = genomic RNA
gagccaatccctgggattcc

SEQ ID NO: 6256 - RNA, 20 nt, Homo sapiens
  source 1..20: mol_type = genomic RNA
agccaatccctgggattcca

SEQ ID NO: 6257 - RNA, 20 nt, Homo sapiens
  source 1..20: mol_type = genomic RNA
gccaatccctgggattccag

SEQ ID NO: 6258 - RNA, 20 nt, Homo sapiens
  source 1..20: mol_type = genomic RNA
ccaatccctgggattccagg

SEQ ID NO: 6259 - RNA, 20 nt, Homo sapiens
  source 1..20: mol_type = genomic RNA
caatccctgggattccagga

SEQ ID NO: 6260 - RNA, 20 nt, Homo sapiens
  source 1..20: mol_type = genomic RNA
aatccctgggattccaggag

SEQ ID NO: 6261 - RNA, 20 nt, Homo sapiens
  source 1..20: mol_type = genomic RNA
atccctgggattccaggagg

SEQ ID NO: 6262 - RNA, 20 nt, Homo sapiens
  source 1..20: mol_type = genomic RNA
tccctgggattccaggaggt

SEQ ID NO: 6263 - RNA, 20 nt, Homo sapiens
  source 1..20: mol_type = genomic RNA
ccctgggattccaggaggtt

SEQ ID NO: 6264 - RNA, 20 nt, Homo sapiens
  source 1..20: mol_type = genomic RNA
cctgggattccaggaggttt

SEQ ID NO: 6265 - RNA, 20 nt, Homo sapiens
  source 1..20: mol_type = genomic RNA
ctgggattccaggaggtttt

SEQ ID NO: 6266 - RNA, 20 nt, Homo sapiens
  source 1..20: mol_type = genomic RNA
tgggattccaggaggttttg

SEQ ID NO: 6267 - RNA, 20 nt, Homo sapiens
  source 1..20: mol_type = genomic RNA
gggattccaggaggttttga

SEQ ID NO: 6268 - RNA, 20 nt, Homo sapiens
  source 1..20: mol_type = genomic RNA
ggattccaggaggttttgag

SEQ ID NO: 6269 - RNA, 20 nt, Homo sapiens
  source 1..20: mol_type = genomic RNA
gattccaggaggttttgagc

SEQ ID NO: 6270 - RNA, 20 nt, Homo sapiens
  source 1..20: mol_type = genomic RNA
attccaggaggttttgagcg

SEQ ID NO: 6271 - RNA, 20 nt, Homo sapiens
  source 1..20: mol_type = genomic RNA
ttccaggaggttttgagcgt

SEQ ID NO: 6272 - RNA, 20 nt, Homo sapiens
  source 1..20: mol_type = genomic RNA
tccaggaggttttgagcgtt

SEQ ID NO: 6273 - RNA, 20 nt, Homo sapiens
  source 1..20: mol_type = genomic RNA
ccaggaggttttgagcgttg

SEQ ID NO: 6274 - RNA, 20 nt, Homo sapiens
  source 1..20: mol_type = genomic RNA
caggaggttttgagcgttga

SEQ ID NO: 6275 - RNA, 20 nt, Homo sapiens
  source 1..20: mol_type = genomic RNA
aggaggttttgagcgttgag

SEQ ID NO: 6276 - RNA, 20 nt, Homo sapiens
  source 1..20: mol_type = genomic RNA
ggaggttttgagcgttgagg

SEQ ID NO: 6277 - RNA, 20 nt, Homo sapiens
  source 1..20: mol_type = genomic RNA
gaggttttgagcgttgaggt

SEQ ID NO: 6278 - RNA, 20 nt, Homo sapiens
  source 1..20: mol_type = genomic RNA
aggttttgagcgttgaggtt

SEQ ID NO: 6279 - RNA, 20 nt, Homo sapiens
  source 1..20: mol_type = genomic RNA
ggttttgagcgttgaggtta

SEQ ID NO: 6280 - RNA, 20 nt, Homo sapiens
  source 1..20: mol_type = genomic RNA
gttttgagcgttgaggttac

SEQ ID NO: 6281 - RNA, 20 nt, Homo sapiens
  source 1..20: mol_type = genomic RNA
ttttgagcgttgaggttaca

SEQ ID NO: 6282 - RNA, 20 nt, Homo sapiens
  source 1..20: mol_type = genomic RNA
tttgagcgttgaggttacac

SEQ ID NO: 6283 - RNA, 20 nt, Homo sapiens
  source 1..20: mol_type = genomic RNA
ttgagcgttgaggttacact

SEQ ID NO: 6284 - RNA, 20 nt, Homo sapiens
  source 1..20: mol_type = genomic RNA
tgagcgttgaggttacactg

SEQ ID NO: 6285 - RNA, 20 nt, Homo sapiens
  source 1..20: mol_type = genomic RNA
gagcgttgaggttacactgc

SEQ ID NO: 6286 - RNA, 20 nt, Homo sapiens
  source 1..20: mol_type = genomic RNA
agcgttgaggttacactgca

SEQ ID NO: 6287 - RNA, 20 nt, Homo sapiens
  source 1..20: mol_type = genomic RNA
gcgttgaggttacactgcat

SEQ ID NO: 6288 - RNA, 20 nt, Homo sapiens
  source 1..20: mol_type = genomic RNA
cgttgaggttacactgcatg

SEQ ID NO: 6289 - RNA, 20 nt, Homo sapiens
  source 1..20: mol_type = genomic RNA
gttgaggttacactgcatgt

SEQ ID NO: 6290 - RNA, 20 nt, Homo sapiens
  source 1..20: mol_type = genomic RNA
ttgaggttacactgcatgtg

SEQ ID NO: 6291 - RNA, 20 nt, Homo sapiens
  source 1..20: mol_type = genomic RNA
tgaggttacactgcatgtgg

SEQ ID NO: 6292 - RNA, 20 nt, Homo sapiens
  source 1..20: mol_type = genomic RNA
gaggttacactgcatgtggc

SEQ ID NO: 6293 - RNA, 20 nt, Homo sapiens
  source 1..20: mol_type = genomic RNA
aggttacactgcatgtggca

SEQ ID NO: 6294 - RNA, 20 nt, Homo sapiens
  source 1..20: mol_type = genomic RNA
ggttacactgcatgtggcag

SEQ ID NO: 6295 - RNA, 20 nt, Homo sapiens
  source 1..20: mol_type = genomic RNA
gttacactgcatgtggcagc

SEQ ID NO: 6296 - RNA, 20 nt, Homo sapiens
  source 1..20: mol_type = genomic RNA
ttacactgcatgtggcagca

SEQ ID NO: 6297 - RNA, 20 nt, Homo sapiens
  source 1..20: mol_type = genomic RNA
tacactgcatgtggcagcaa

SEQ ID NO: 6298 - RNA, 20 nt, Homo sapiens
  source 1..20: mol_type = genomic RNA
acactgcatgtggcagcaaa

SEQ ID NO: 6299 - RNA, 20 nt, Homo sapiens
  source 1..20: mol_type = genomic RNA
cactgcatgtggcagcaaac

SEQ ID NO: 6300 - RNA, 20 nt, Homo sapiens
  source 1..20: mol_type = genomic RNA
actgcatgtggcagcaaact

SEQ ID NO: 6301 - RNA, 20 nt, Homo sapiens
  source 1..20: mol_type = genomic RNA
ctgcatgtggcagcaaactt

SEQ ID NO: 6302 - RNA, 20 nt, Homo sapiens
  source 1..20: mol_type = genomic RNA
tgcatgtggcagcaaacttc

SEQ ID NO: 6303 - RNA, 20 nt, Homo sapiens
  source 1..20: mol_type = genomic RNA
gcatgtggcagcaaacttca

SEQ ID NO: 6304 - RNA, 20 nt, Homo sapiens
  source 1..20: mol_type = genomic RNA
catgtggcagcaaacttcag

SEQ ID NO: 6305 - RNA, 20 nt, Homo sapiens
  source 1..20: mol_type = genomic RNA
atgtggcagcaaacttcagc

SEQ ID NO: 6306 - RNA, 20 nt, Homo sapiens
  source 1..20: mol_type = genomic RNA
tgtggcagcaaacttcagcg

SEQ ID NO: 6307 - RNA, 20 nt, Homo sapiens
  source 1..20: mol_type = genomic RNA
gtggcagcaaacttcagcgt

SEQ ID NO: 6308 - RNA, 20 nt, Homo sapiens
  source 1..20: mol_type = genomic RNA
tggcagcaaacttcagcgtg

SEQ ID NO: 6309 - RNA, 20 nt, Homo sapiens
  source 1..20: mol_type = genomic RNA
ggcagcaaacttcagcgtgc

SEQ ID NO: 6310 - RNA, 20 nt, Homo sapiens
  source 1..20: mol_type = genomic RNA
gcagcaaacttcagcgtgcc

SEQ ID NO: 6311 - RNA, 20 nt, Homo sapiens
  source 1..20: mol_type = genomic RNA
cagcaaacttcagcgtgccc

SEQ ID NO: 6312 - RNA, 20 nt, Homo sapiens
  source 1..20: mol_type = genomic RNA
agcaaacttcagcgtgcccg

SEQ ID NO: 6313 - RNA, 20 nt, Homo sapiens
  source 1..20: mol_type = genomic RNA
gcaaacttcagcgtgcccgt

SEQ ID NO: 6314 - RNA, 20 nt, Homo sapiens
  source 1..20: mol_type = genomic RNA
caaacttcagcgtgcccgtc

SEQ ID NO: 6315 - RNA, 20 nt, Homo sapiens
  source 1..20: mol_type = genomic RNA
aaacttcagcgtgcccgtcg

SEQ ID NO: 6316 - RNA, 20 nt, Homo sapiens
  source 1..20: mol_type = genomic RNA
aacttcagcgtgcccgtcgt

SEQ ID NO: 6317 - RNA, 20 nt, Homo sapiens
  source 1..20: mol_type = genomic RNA
acttcagcgtgcccgtcgtc

SEQ ID NO: 6318 - RNA, 20 nt, Homo sapiens
  source 1..20: mol_type = genomic RNA
cttcagcgtgcccgtcgtca

SEQ ID NO: 6319 - RNA, 20 nt, Homo sapiens
  source 1..20: mol_type = genomic RNA
ttcagcgtgcccgtcgtcag

SEQ ID NO: 6320 - RNA, 20 nt, Homo sapiens
  source 1..20: mol_type = genomic RNA
tcagcgtgcccgtcgtcagc

SEQ ID NO: 6321 - RNA, 20 nt, Homo sapiens
  source 1..20: mol_type = genomic RNA
cagcgtgcccgtcgtcagcg

SEQ ID NO: 6322 - RNA, 20 nt, Homo sapiens
  source 1..20: mol_type = genomic RNA
agcgtgcccgtcgtcagcgc

SEQ ID NO: 6323 - RNA, 20 nt, Homo sapiens
  source 1..20: mol_type = genomic RNA
gcgtgcccgtcgtcagcgcc

SEQ ID NO: 6324 - RNA, 20 nt, Homo sapiens
  source 1..20: mol_type = genomic RNA
cgtgcccgtcgtcagcgccc

SEQ ID NO: 6325 - RNA, 20 nt, Homo sapiens
  source 1..20: mol_type = genomic RNA
gtgcccgtcgtcagcgcccc

SEQ ID NO: 6326 - RNA, 20 nt, Homo sapiens
  source 1..20: mol_type = genomic RNA
tgcccgtcgtcagcgccccc

SEQ ID NO: 6327 - RNA, 20 nt, Homo sapiens
  source 1..20: mol_type = genomic RNA
gcccgtcgtcagcgcccccc

SEQ ID NO: 6328 - RNA, 20 nt, Homo sapiens
  source 1..20: mol_type = genomic RNA
cccgtcgtcagcgcccccca

SEQ ID NO: 6329 - RNA, 20 nt, Homo sapiens
  source 1..20: mol_type = genomic RNA
ccgtcgtcagcgccccccac

SEQ ID NO: 6330 - RNA, 20 nt, Homo sapiens
  source 1..20: mol_type = genomic RNA
cgtcgtcagcgccccccaca

SEQ ID NO: 6331 - RNA, 20 nt, Homo sapiens
  source 1..20: mol_type = genomic RNA
gtcgtcagcgccccccacag

SEQ ID NO: 6332 - RNA, 20 nt, Homo sapiens
  source 1..20: mol_type = genomic RNA
tcgtcagcgccccccacagc

SEQ ID NO: 6333 - RNA, 20 nt, Homo sapiens
  source 1..20: mol_type = genomic RNA
cgtcagcgccccccacagcc

SEQ ID NO: 6334 - RNA, 20 nt, Homo sapiens
  source 1..20: mol_type = genomic RNA
gtcagcgccccccacagccc

SEQ ID NO: 6335 - RNA, 20 nt, Homo sapiens
  source 1..20: mol_type = genomic RNA
tcagcgccccccacagcccc

SEQ ID NO: 6336 - RNA, 20 nt, Homo sapiens
  source 1..20: mol_type = genomic RNA
cagcgccccccacagcccct

SEQ ID NO: 6337 - RNA, 20 nt, Homo sapiens
  source 1..20: mol_type = genomic RNA
agcgccccccacagcccctc

SEQ ID NO: 6338 - RNA, 20 nt, Homo sapiens
  source 1..20: mol_type = genomic RNA
gcgccccccacagcccctcc

SEQ ID NO: 6339 - RNA, 20 nt, Homo sapiens
  source 1..20: mol_type = genomic RNA
cgccccccacagcccctccc

SEQ ID NO: 6340 - RNA, 20 nt, Homo sapiens
  source 1..20: mol_type = genomic RNA
gccccccacagcccctccca

SEQ ID NO: 6341 - RNA, 20 nt, Homo sapiens
  source 1..20: mol_type = genomic RNA
ccccccacagcccctcccag

SEQ ID NO: 6342 - RNA, 20 nt, Homo sapiens
  source 1..20: mol_type = genomic RNA
cccccacagcccctcccagg

SEQ ID NO: 6343 - RNA, 20 nt, Homo sapiens
  source 1..20: mol_type = genomic RNA
ccccacagcccctcccagga

SEQ ID NO: 6344 - RNA, 20 nt, Homo sapiens
  source 1..20: mol_type = genomic RNA
cccacagcccctcccaggat

SEQ ID NO: 6345 - RNA, 20 nt, Homo sapiens
  source 1..20: mol_type = genomic RNA
ccacagcccctcccaggatg

SEQ ID NO: 6346 - RNA, 20 nt, Homo sapiens
  source 1..20: mol_type = genomic RNA
cacagcccctcccaggatga

SEQ ID NO: 6347 - RNA, 20 nt, Homo sapiens
  source 1..20: mol_type = genomic RNA
acagcccctcccaggatgag

SEQ ID NO: 6348 - RNA, 20 nt, Homo sapiens
  source 1..20: mol_type = genomic RNA
cagcccctcccaggatgagc

SEQ ID NO: 6349 - RNA, 20 nt, Homo sapiens
  source 1..20: mol_type = genomic RNA
agcccctcccaggatgagct

SEQ ID NO: 6350 - RNA, 20 nt, Homo sapiens
  source 1..20: mol_type = genomic RNA
gcccctcccaggatgagctc

SEQ ID NO: 6351 - RNA, 20 nt, Homo sapiens
  source 1..20: mol_type = genomic RNA
cccctcccaggatgagctca

SEQ ID NO: 6352 - RNA, 20 nt, Homo sapiens
  source 1..20: mol_type = genomic RNA
ccctcccaggatgagctcac

SEQ ID NO: 6353 - RNA, 20 nt, Homo sapiens
  source 1..20: mol_type = genomic RNA
cctcccaggatgagctcacc

SEQ ID NO: 6354 - RNA, 20 nt, Homo sapiens
  source 1..20: mol_type = genomic RNA
ctcccaggatgagctcacct

SEQ ID NO: 6355 - RNA, 20 nt, Homo sapiens
  source 1..20: mol_type = genomic RNA
tcccaggatgagctcacctt

SEQ ID NO: 6356 - RNA, 20 nt, Homo sapiens
  source 1..20: mol_type = genomic RNA
cccaggatgagctcaccttc

SEQ ID NO: 6357 - RNA, 20 nt, Homo sapiens
  source 1..20: mol_type = genomic RNA
ccaggatgagctcaccttca

SEQ ID NO: 6358 - RNA, 20 nt, Homo sapiens
  source 1..20: mol_type = genomic RNA
caggatgagctcaccttcac

SEQ ID NO: 6359 - RNA, 20 nt, Homo sapiens
  source 1..20: mol_type = genomic RNA
aggatgagctcaccttcacg

SEQ ID NO: 6360 - RNA, 20 nt, Homo sapiens
  source 1..20: mol_type = genomic RNA
ggatgagctcaccttcacgt

SEQ ID NO: 6361 - RNA, 20 nt, Homo sapiens
  source 1..20: mol_type = genomic RNA
gatgagctcaccttcacgtg

SEQ ID NO: 6362 - RNA, 20 nt, Homo sapiens
  source 1..20: mol_type = genomic RNA
atgagctcaccttcacgtgt

SEQ ID NO: 6363 - RNA, 20 nt, Homo sapiens
  source 1..20: mol_type = genomic RNA
tgagctcaccttcacgtgta

SEQ ID NO: 6364 - RNA, 20 nt, Homo sapiens
  source 1..20: mol_type = genomic RNA
gagctcaccttcacgtgtac

SEQ ID NO: 6365 - RNA, 20 nt, Homo sapiens
  source 1..20: mol_type = genomic RNA
agctcaccttcacgtgtaca

SEQ ID NO: 6366 - RNA, 20 nt, Homo sapiens
  source 1..20: mol_type = genomic RNA
gctcaccttcacgtgtacat

SEQ ID NO: 6367 - RNA, 20 nt, Homo sapiens
  source 1..20: mol_type = genomic RNA
ctcaccttcacgtgtacatc

SEQ ID NO: 6368 - RNA, 20 nt, Homo sapiens
  source 1..20: mol_type = genomic RNA
tcaccttcacgtgtacatcc

SEQ ID NO: 6369 - RNA, 20 nt, Homo sapiens
  source 1..20: mol_type = genomic RNA
caccttcacgtgtacatcca

SEQ ID NO: 6370 - RNA, 20 nt, Homo sapiens
  source 1..20: mol_type = genomic RNA
accttcacgtgtacatccat

SEQ ID NO: 6371 - RNA, 20 nt, Homo sapiens
  source 1..20: mol_type = genomic RNA
ccttcacgtgtacatccata

SEQ ID NO: 6372 - RNA, 20 nt, Homo sapiens
  source 1..20: mol_type = genomic RNA
cttcacgtgtacatccataa

SEQ ID NO: 6373 - RNA, 20 nt, Homo sapiens
  source 1..20: mol_type = genomic RNA
ttcacgtgtacatccataaa

SEQ ID NO: 6374 - RNA, 20 nt, Homo sapiens
  source 1..20: mol_type = genomic RNA
tcacgtgtacatccataaac

SEQ ID NO: 6375 - RNA, 20 nt, Homo sapiens
  source 1..20: mol_type = genomic RNA
cacgtgtacatccataaacg

SEQ ID NO: 6376 - RNA, 20 nt, Homo sapiens
  source 1..20: mol_type = genomic RNA
acgtgtacatccataaacgg

SEQ ID NO: 6377 - RNA, 20 nt, Homo sapiens
  source 1..20: mol_type = genomic RNA
cgtgtacatccataaacggc

SEQ ID NO: 6378 - RNA, 20 nt, Homo sapiens
  source 1..20: mol_type = genomic RNA
gtgtacatccataaacggct

SEQ ID NO: 6379 - RNA, 20 nt, Homo sapiens
  source 1..20: mol_type = genomic RNA
tgtacatccataaacggcta

SEQ ID NO: 6380 - RNA, 20 nt, Homo sapiens
  source 1..20: mol_type = genomic RNA
gtacatccataaacggctac

SEQ ID NO: 6381 - RNA, 20 nt, Homo sapiens
  source 1..20: mol_type = genomic RNA
tacatccataaacggctacc

SEQ ID NO: 6382 - RNA, 20 nt, Homo sapiens
  source 1..20: mol_type = genomic RNA
acatccataaacggctaccc

SEQ ID NO: 6383 - RNA, 20 nt, Homo sapiens
  source 1..20: mol_type = genomic RNA
catccataaacggctacccc

SEQ ID NO: 6384 - RNA, 20 nt, Homo sapiens
  source 1..20: mol_type = genomic RNA
atccataaacggctacccca

SEQ ID NO: 6385 - RNA, 20 nt, Homo sapiens
  source 1..20: mol_type = genomic RNA
tccataaacggctaccccag

SEQ ID NO: 6386 - RNA, 20 nt, Homo sapiens
  source 1..20: mol_type = genomic RNA
ccataaacggctaccccagg

SEQ ID NO: 6387 - RNA, 20 nt, Homo sapiens
  source 1..20: mol_type = genomic RNA
cataaacggctaccccaggc

SEQ ID NO: 6388 - RNA, 20 nt, Homo sapiens
  source 1..20: mol_type = genomic RNA
ataaacggctaccccaggcc

SEQ ID NO: 6389 - RNA, 20 nt, Homo sapiens
  source 1..20: mol_type = genomic RNA
taaacggctaccccaggccc

SEQ ID NO: 6390 - RNA, 20 nt, Homo sapiens
  source 1..20: mol_type = genomic RNA
aaacggctaccccaggccca

SEQ ID NO: 6391 - RNA, 20 nt, Homo sapiens
  source 1..20: mol_type = genomic RNA
aacggctaccccaggcccaa

SEQ ID NO: 6392 - RNA, 20 nt, Homo sapiens
  source 1..20: mol_type = genomic RNA
acggctaccccaggcccaac

SEQ ID NO: 6393 - RNA, 20 nt, Homo sapiens
  source 1..20: mol_type = genomic RNA
cggctaccccaggcccaacg

SEQ ID NO: 6394 - RNA, 20 nt, Homo sapiens
  source 1..20: mol_type = genomic RNA
ggctaccccaggcccaacgt

SEQ ID NO: 6395 - RNA, 20 nt, Homo sapiens
  source 1..20: mol_type = genomic RNA
gctaccccaggcccaacgtg

SEQ ID NO: 6396 - RNA, 20 nt, Homo sapiens
  source 1..20: mol_type = genomic RNA
ctaccccaggcccaacgtgt

SEQ ID NO: 6397 - RNA, 20 nt, Homo sapiens
  source 1..20: mol_type = genomic RNA
taccccaggcccaacgtgta

SEQ ID NO: 6398 - RNA, 20 nt, Homo sapiens
  source 1..20: mol_type = genomic RNA
accccaggcccaacgtgtac

SEQ ID NO: 6399 - RNA, 20 nt, Homo sapiens
  source 1..20: mol_type = genomic RNA
ccccaggcccaacgtgtact

SEQ ID NO: 6400 - RNA, 20 nt, Homo sapiens
  source 1..20: mol_type = genomic RNA
cccaggcccaacgtgtactg

SEQ ID NO: 6401 - RNA, 20 nt, Homo sapiens
  source 1..20: mol_type = genomic RNA
ccaggcccaacgtgtactgg

SEQ ID NO: 6402 - RNA, 20 nt, Homo sapiens
  source 1..20: mol_type = genomic RNA
caggcccaacgtgtactgga

SEQ ID NO: 6403 - RNA, 20 nt, Homo sapiens
  source 1..20: mol_type = genomic RNA
aggcccaacgtgtactggat

SEQ ID NO: 6404 - RNA, 20 nt, Homo sapiens
  source 1..20: mol_type = genomic RNA
ggcccaacgtgtactggatc

SEQ ID NO: 6405 - RNA, 20 nt, Homo sapiens
  source 1..20: mol_type = genomic RNA
gcccaacgtgtactggatca

SEQ ID NO: 6406 - RNA, 20 nt, Homo sapiens
  source 1..20: mol_type = genomic RNA
cccaacgtgtactggatcaa

SEQ ID NO: 6407 - RNA, 20 nt, Homo sapiens
  source 1..20: mol_type = genomic RNA
ccaacgtgtactggatcaat

SEQ ID NO: 6408 - RNA, 20 nt, Homo sapiens
  source 1..20: mol_type = genomic RNA
caacgtgtactggatcaata

SEQ ID NO: 6409 - RNA, 20 nt, Homo sapiens
  source 1..20: mol_type = genomic RNA
aacgtgtactggatcaataa

SEQ ID NO: 6410 - RNA, 20 nt, Homo sapiens
  source 1..20: mol_type = genomic RNA
acgtgtactggatcaataag

SEQ ID NO: 6411 - RNA, 20 nt, Homo sapiens
  source 1..20: mol_type = genomic RNA
cgtgtactggatcaataaga

SEQ ID NO: 6412 - RNA, 20 nt, Homo sapiens
  source 1..20: mol_type = genomic RNA
gtgtactggatcaataagac

SEQ ID NO: 6413 - RNA, 20 nt, Homo sapiens
  source 1..20: mol_type = genomic RNA
tgtactggatcaataagacg

SEQ ID NO: 6414 - RNA, 20 nt, Homo sapiens
  source 1..20: mol_type = genomic RNA
gtactggatcaataagacgg

SEQ ID NO: 6415 - RNA, 20 nt, Homo sapiens
  source 1..20: mol_type = genomic RNA
tactggatcaataagacgga

SEQ ID NO: 6416 - RNA, 20 nt, Homo sapiens
  source 1..20: mol_type = genomic RNA
actggatcaataagacggac

SEQ ID NO: 6417 - RNA, 20 nt, Homo sapiens
  source 1..20: mol_type = genomic RNA
ctggatcaataagacggaca

SEQ ID NO: 6418 - RNA, 20 nt, Homo sapiens
  source 1..20: mol_type = genomic RNA
tggatcaataagacggacaa

SEQ ID NO: 6419 - RNA, 20 nt, Homo sapiens
  source 1..20: mol_type = genomic RNA
ggatcaataagacggacaac

SEQ ID NO: 6420 - RNA, 20 nt, Homo sapiens
  source 1..20: mol_type = genomic RNA
gatcaataagacggacaaca

SEQ ID NO: 6421 - RNA, 20 nt, Homo sapiens
  source 1..20: mol_type = genomic RNA
atcaataagacggacaacag

SEQ ID NO: 6422 - RNA, 20 nt, Homo sapiens
  source 1..20: mol_type = genomic RNA
tcaataagacggacaacagc

SEQ ID NO: 6423 - RNA, 20 nt, Homo sapiens
  source 1..20: mol_type = genomic RNA
caataagacggacaacagcc

SEQ ID NO: 6424 - RNA, 20 nt, Homo sapiens
  source 1..20: mol_type = genomic RNA
aataagacggacaacagcct

SEQ ID NO: 6425 - RNA, 20 nt, Homo sapiens
  source 1..20: mol_type = genomic RNA
ataagacggacaacagcctg

SEQ ID NO: 6426 - RNA, 20 nt, Homo sapiens
  source 1..20: mol_type = genomic RNA
taagacggacaacagcctgc

SEQ ID NO: 6427 - RNA, 20 nt, Homo sapiens
  source 1..20: mol_type = genomic RNA
aagacggacaacagcctgct

SEQ ID NO: 6428 - RNA, 20 nt, Homo sapiens
  source 1..20: mol_type = genomic RNA
agacggacaacagcctgctg

SEQ ID NO: 6429 - RNA, 20 nt, Homo sapiens
  source 1..20: mol_type = genomic RNA
gacggacaacagcctgctgg

SEQ ID NO: 6430 - RNA, 20 nt, Homo sapiens
  source 1..20: mol_type = genomic RNA
acggacaacagcctgctgga

SEQ ID NO: 6431 - RNA, 20 nt, Homo sapiens
  source 1..20: mol_type = genomic RNA
cggacaacagcctgctggac

SEQ ID NO: 6432 - RNA, 20 nt, Homo sapiens
  source 1..20: mol_type = genomic RNA
ggacaacagcctgctggacc

SEQ ID NO: 6433 - RNA, 20 nt, Homo sapiens
  source 1..20: mol_type = genomic RNA
gacaacagcctgctggacca

SEQ ID NO: 6434 - RNA, 20 nt, Homo sapiens
  source 1..20: mol_type = genomic RNA
acaacagcctgctggaccag

SEQ ID NO: 6435 - RNA, 20 nt, Homo sapiens
  source 1..20: mol_type = genomic RNA
caacagcctgctggaccagg

SEQ ID NO: 6436 - RNA, 20 nt, Homo sapiens
  source 1..20: mol_type = genomic RNA
aacagcctgctggaccaggc

SEQ ID NO: 6437 - RNA, 20 nt, Homo sapiens
  source 1..20: mol_type = genomic RNA
acagcctgctggaccaggct

SEQ ID NO: 6438 - RNA, 20 nt, Homo sapiens
  source 1..20: mol_type = genomic RNA
cagcctgctggaccaggctc

SEQ ID NO: 6439 - RNA, 20 nt, Homo sapiens
  source 1..20: mol_type = genomic RNA
agcctgctggaccaggctct

SEQ ID NO: 6440 - RNA, 20 nt, Homo sapiens
  source 1..20: mol_type = genomic RNA
gcctgctggaccaggctctg

SEQ ID NO: 6441 - RNA, 20 nt, Homo sapiens
  source 1..20: mol_type = genomic RNA
cctgctggaccaggctctgc

SEQ ID NO: 6442 - RNA, 20 nt, Homo sapiens
  source 1..20: mol_type = genomic RNA
ctgctggaccaggctctgca

SEQ ID NO: 6443 - RNA, 20 nt, Homo sapiens
  source 1..20: mol_type = genomic RNA
tgctggaccaggctctgcag

SEQ ID NO: 6444 - RNA, 20 nt, Homo sapiens
  source 1..20: mol_type = genomic RNA
gctggaccaggctctgcaga

SEQ ID NO: 6445 - RNA, 20 nt, Homo sapiens
  source 1..20: mol_type = genomic RNA
ctggaccaggctctgcagaa

SEQ ID NO: 6446 - RNA, 20 nt, Homo sapiens
  source 1..20: mol_type = genomic RNA
tggaccaggctctgcagaat

SEQ ID NO: 6447 - RNA, 20 nt, Homo sapiens
  source 1..20: mol_type = genomic RNA
ggaccaggctctgcagaatg

SEQ ID NO: 6448 - RNA, 20 nt, Homo sapiens
  source 1..20: mol_type = genomic RNA
gaccaggctctgcagaatga

SEQ ID NO: 6449 - RNA, 20 nt, Homo sapiens
  source 1..20: mol_type = genomic RNA
accaggctctgcagaatgac

SEQ ID NO: 6450 - RNA, 20 nt, Homo sapiens
  source 1..20: mol_type = genomic RNA
ccaggctctgcagaatgaca

SEQ ID NO: 6451 - RNA, 20 nt, Homo sapiens
  source 1..20: mol_type = genomic RNA
caggctctgcagaatgacac

SEQ ID NO: 6452 - RNA, 20 nt, Homo sapiens
  source 1..20: mol_type = genomic RNA
aggctctgcagaatgacacc

SEQ ID NO: 6453 - RNA, 20 nt, Homo sapiens
  source 1..20: mol_type = genomic RNA
ggctctgcagaatgacaccg

SEQ ID NO: 6454 - RNA, 20 nt, Homo sapiens
  source 1..20: mol_type = genomic RNA
gctctgcagaatgacaccgt

SEQ ID NO: 6455 - RNA, 20 nt, Homo sapiens
  source 1..20: mol_type = genomic RNA
ctctgcagaatgacaccgtc

SEQ ID NO: 6456 - RNA, 20 nt, Homo sapiens
  source 1..20: mol_type = genomic RNA
tctgcagaatgacaccgtct

SEQ ID NO: 6457 - RNA, 20 nt, Homo sapiens
  source 1..20: mol_type = genomic RNA
ctgcagaatgacaccgtctt

SEQ ID NO: 6458 - RNA, 20 nt, Homo sapiens
  source 1..20: mol_type = genomic RNA
tgcagaatgacaccgtcttc

SEQ ID NO: 6459 - RNA, 20 nt, Homo sapiens
  source 1..20: mol_type = genomic RNA
gcagaatgacaccgtcttct

SEQ ID NO: 6460 - RNA, 20 nt, Homo sapiens
  source 1..20: mol_type = genomic RNA
cagaatgacaccgtcttctt

SEQ ID NO: 6461 - RNA, 20 nt, Homo sapiens
  source 1..20: mol_type = genomic RNA
agaatgacaccgtcttcttg

SEQ ID NO: 6462 - RNA, 20 nt, Homo sapiens
  source 1..20: mol_type = genomic RNA
gaatgacaccgtcttcttga

SEQ ID NO: 6463 - RNA, 20 nt, Homo sapiens
  source 1..20: mol_type = genomic RNA
aatgacaccgtcttcttgaa

SEQ ID NO: 6464 - RNA, 20 nt, Homo sapiens
  source 1..20: mol_type = genomic RNA
atgacaccgtcttcttgaac

SEQ ID NO: 6465 - RNA, 20 nt, Homo sapiens
  source 1..20: mol_type = genomic RNA
tgacaccgtcttcttgaaca

SEQ ID NO: 6466 - RNA, 20 nt, Homo sapiens
  source 1..20: mol_type = genomic RNA
gacaccgtcttcttgaacat

SEQ ID NO: 6467 - RNA, 20 nt, Homo sapiens
  source 1..20: mol_type = genomic RNA
acaccgtcttcttgaacatg

SEQ ID NO: 6468 - RNA, 20 nt, Homo sapiens
  source 1..20: mol_type = genomic RNA
caccgtcttcttgaacatgc

SEQ ID NO: 6469 - RNA, 20 nt, Homo sapiens
  source 1..20: mol_type = genomic RNA
accgtcttcttgaacatgcg

SEQ ID NO: 6470 - RNA, 20 nt, Homo sapiens
  source 1..20: mol_type = genomic RNA
ccgtcttcttgaacatgcgg

SEQ ID NO: 6471 - RNA, 20 nt, Homo sapiens
  source 1..20: mol_type = genomic RNA
cgtcttcttgaacatgcggg

SEQ ID NO: 6472 - RNA, 20 nt, Homo sapiens
  source 1..20: mol_type = genomic RNA
gtcttcttgaacatgcgggg

SEQ ID NO: 6473 - RNA, 20 nt, Homo sapiens
  source 1..20: mol_type = genomic RNA
tcttcttgaacatgcggggc

SEQ ID NO: 6474 - RNA, 20 nt, Homo sapiens
  source 1..20: mol_type = genomic RNA
cttcttgaacatgcggggct

SEQ ID NO: 6475 - RNA, 20 nt, Homo sapiens
  source 1..20: mol_type = genomic RNA
ttcttgaacatgcggggctt

SEQ ID NO: 6476 - RNA, 20 nt, Homo sapiens
  source 1..20: mol_type = genomic RNA
tcttgaacatgcggggcttg

SEQ ID NO: 6477 - RNA, 20 nt, Homo sapiens
  source 1..20: mol_type = genomic RNA
cttgaacatgcggggcttgt

SEQ ID NO: 6478 - RNA, 20 nt, Homo sapiens
  source 1..20: mol_type = genomic RNA
ttgaacatgcggggcttgta

SEQ ID NO: 6479 - RNA, 20 nt, Homo sapiens
  source 1..20: mol_type = genomic RNA
tgaacatgcggggcttgtat

SEQ ID NO: 6480 - RNA, 20 nt, Homo sapiens
  source 1..20: mol_type = genomic RNA
gaacatgcggggcttgtatg

SEQ ID NO: 6481 - RNA, 20 nt, Homo sapiens
  source 1..20: mol_type = genomic RNA
aacatgcggggcttgtatga

SEQ ID NO: 6482 - RNA, 20 nt, Homo sapiens
  source 1..20: mol_type = genomic RNA
acatgcggggcttgtatgac

SEQ ID NO: 6483 - RNA, 20 nt, Homo sapiens
  source 1..20: mol_type = genomic RNA
catgcggggcttgtatgacg

SEQ ID NO: 6484 - RNA, 20 nt, Homo sapiens
  source 1..20: mol_type = genomic RNA
atgcggggcttgtatgacgt

SEQ ID NO: 6485 - RNA, 20 nt, Homo sapiens
  source 1..20: mol_type = genomic RNA
tgcggggcttgtatgacgtg

SEQ ID NO: 6486 - RNA, 20 nt, Homo sapiens
  source 1..20: mol_type = genomic RNA
gcggggcttgtatgacgtgg

SEQ ID NO: 6487 - RNA, 20 nt, Homo sapiens
  source 1..20: mol_type = genomic RNA
cggggcttgtatgacgtggt

SEQ ID NO: 6488 - RNA, 20 nt, Homo sapiens
  source 1..20: mol_type = genomic RNA
ggggcttgtatgacgtggtc

SEQ ID NO: 6489 - RNA, 20 nt, Homo sapiens
  source 1..20: mol_type = genomic RNA
gggcttgtatgacgtggtca

SEQ ID NO: 6490 - RNA, 20 nt, Homo sapiens
  source 1..20: mol_type = genomic RNA
ggcttgtatgacgtggtcag

SEQ ID NO: 6491 - RNA, 20 nt, Homo sapiens
  source 1..20: mol_type = genomic RNA
gcttgtatgacgtggtcagc

SEQ ID NO: 6492 - RNA, 20 nt, Homo sapiens
  source 1..20: mol_type = genomic RNA
cttgtatgacgtggtcagcg

SEQ ID NO: 6493 - RNA, 20 nt, Homo sapiens
  source 1..20: mol_type = genomic RNA
ttgtatgacgtggtcagcgt

SEQ ID NO: 6494 - RNA, 20 nt, Homo sapiens
  source 1..20: mol_type = genomic RNA
tgtatgacgtggtcagcgtg

SEQ ID NO: 6495 - RNA, 20 nt, Homo sapiens
  source 1..20: mol_type = genomic RNA
gtatgacgtggtcagcgtgc

SEQ ID NO: 6496 - RNA, 20 nt, Homo sapiens
  source 1..20: mol_type = genomic RNA
tatgacgtggtcagcgtgct

SEQ ID NO: 6497 - RNA, 20 nt, Homo sapiens
  source 1..20: mol_type = genomic RNA
atgacgtggtcagcgtgctg

SEQ ID NO: 6498 - RNA, 20 nt, Homo sapiens
  source 1..20: mol_type = genomic RNA
tgacgtggtcagcgtgctga

SEQ ID NO: 6499 - RNA, 20 nt, Homo sapiens
  source 1..20: mol_type = genomic RNA
gacgtggtcagcgtgctgag

SEQ ID NO: 6500 - RNA, 20 nt, Homo sapiens
  source 1..20: mol_type = genomic RNA
acgtggtcagcgtgctgagg

SEQ ID NO: 6501 - RNA, 20 nt, Homo sapiens
  source 1..20: mol_type = genomic RNA
cgtggtcagcgtgctgagga

SEQ ID NO: 6502 - RNA, 20 nt, Homo sapiens
  source 1..20: mol_type = genomic RNA
gtggtcagcgtgctgaggat

SEQ ID NO: 6503 - RNA, 20 nt, Homo sapiens
  source 1..20: mol_type = genomic RNA
tggtcagcgtgctgaggatc

SEQ ID NO: 6504 - RNA, 20 nt, Homo sapiens
  source 1..20: mol_type = genomic RNA
ggtcagcgtgctgaggatcg

SEQ ID NO: 6505 - RNA, 20 nt, Homo sapiens
  source 1..20: mol_type = genomic RNA
gtcagcgtgctgaggatcgc

SEQ ID NO: 6506 - RNA, 20 nt, Homo sapiens
  source 1..20: mol_type = genomic RNA
tcagcgtgctgaggatcgca

SEQ ID NO: 6507 - RNA, 20 nt, Homo sapiens
  source 1..20: mol_type = genomic RNA
cagcgtgctgaggatcgcac

SEQ ID NO: 6508 - RNA, 20 nt, Homo sapiens
  source 1..20: mol_type = genomic RNA
agcgtgctgaggatcgcacg

SEQ ID NO: 6509 - RNA, 20 nt, Homo sapiens
  source 1..20: mol_type = genomic RNA
gcgtgctgaggatcgcacgg

SEQ ID NO: 6510 - RNA, 20 nt, Homo sapiens
  source 1..20: mol_type = genomic RNA
cgtgctgaggatcgcacgga

SEQ ID NO: 6511 - RNA, 20 nt, Homo sapiens
  source 1..20: mol_type = genomic RNA
gtgctgaggatcgcacggac

SEQ ID NO: 6512 - RNA, 20 nt, Homo sapiens
  source 1..20: mol_type = genomic RNA
tgctgaggatcgcacggacc

SEQ ID NO: 6513 - RNA, 20 nt, Homo sapiens
  source 1..20: mol_type = genomic RNA
gctgaggatcgcacggaccc

SEQ ID NO: 6514 - RNA, 20 nt, Homo sapiens
  source 1..20: mol_type = genomic RNA
ctgaggatcgcacggacccc

SEQ ID NO: 6515 - RNA, 20 nt, Homo sapiens
  source 1..20: mol_type = genomic RNA
tgaggatcgcacggaccccc

SEQ ID NO: 6516 - RNA, 20 nt, Homo sapiens
  source 1..20: mol_type = genomic RNA
gaggatcgcacggaccccca

SEQ ID NO: 6517 - RNA, 20 nt, Homo sapiens
  source 1..20: mol_type = genomic RNA
aggatcgcacggacccccag

SEQ ID NO: 6518 - RNA, 20 nt, Homo sapiens
  source 1..20: mol_type = genomic RNA
ggatcgcacggacccccagc

SEQ ID NO: 6519 - RNA, 20 nt, Homo sapiens
  source 1..20: mol_type = genomic RNA
gatcgcacggacccccagcg

SEQ ID NO: 6520 - RNA, 20 nt, Homo sapiens
  source 1..20: mol_type = genomic RNA
atcgcacggacccccagcgt

SEQ ID NO: 6521 - RNA, 20 nt, Homo sapiens
  source 1..20: mol_type = genomic RNA
tcgcacggacccccagcgtg

SEQ ID NO: 6522 - RNA, 20 nt, Homo sapiens
  source 1..20: mol_type = genomic RNA
cgcacggacccccagcgtga

SEQ ID NO: 6523 - RNA, 20 nt, Homo sapiens
  source 1..20: mol_type = genomic RNA
gcacggacccccagcgtgaa

SEQ ID NO: 6524 - RNA, 20 nt, Homo sapiens
  source 1..20: mol_type = genomic RNA
cacggacccccagcgtgaac

SEQ ID NO: 6525 - RNA, 20 nt, Homo sapiens
  source 1..20: mol_type = genomic RNA
acggacccccagcgtgaaca

SEQ ID NO: 6526 - RNA, 20 nt, Homo sapiens
  source 1..20: mol_type = genomic RNA
cggacccccagcgtgaacat

SEQ ID NO: 6527 - RNA, 20 nt, Homo sapiens
  source 1..20: mol_type = genomic RNA
ggacccccagcgtgaacatt

SEQ ID NO: 6528 - RNA, 20 nt, Homo sapiens
  source 1..20: mol_type = genomic RNA
gacccccagcgtgaacattg

SEQ ID NO: 6529 - RNA, 20 nt, Homo sapiens
  source 1..20: mol_type = genomic RNA
acccccagcgtgaacattgg

SEQ ID NO: 6530 - RNA, 20 nt, Homo sapiens
  source 1..20: mol_type = genomic RNA
cccccagcgtgaacattggc

SEQ ID NO: 6531 - RNA, 20 nt, Homo sapiens
  source 1..20: mol_type = genomic RNA
ccccagcgtgaacattggct

SEQ ID NO: 6532 - RNA, 20 nt, Homo sapiens
  source 1..20: mol_type = genomic RNA
cccagcgtgaacattggctg

SEQ ID NO: 6533 - RNA, 20 nt, Homo sapiens
  source 1..20: mol_type = genomic RNA
ccagcgtgaacattggctgc

SEQ ID NO: 6534 - RNA, 20 nt, Homo sapiens
  source 1..20: mol_type = genomic RNA
cagcgtgaacattggctgct

SEQ ID NO: 6535 - RNA, 20 nt, Homo sapiens
  source 1..20: mol_type = genomic RNA
agcgtgaacattggctgctg

SEQ ID NO: 6536 - RNA, 20 nt, Homo sapiens
  source 1..20: mol_type = genomic RNA
gcgtgaacattggctgctgc

SEQ ID NO: 6537 - RNA, 20 nt, Homo sapiens
  source 1..20: mol_type = genomic RNA
cgtgaacattggctgctgca

SEQ ID NO: 6538 - RNA, 20 nt, Homo sapiens
  source 1..20: mol_type = genomic RNA
gtgaacattggctgctgcat

SEQ ID NO: 6539 - RNA, 20 nt, Homo sapiens
  source 1..20: mol_type = genomic RNA
tgaacattggctgctgcata

SEQ ID NO: 6540 - RNA, 20 nt, Homo sapiens
  source 1..20: mol_type = genomic RNA
gaacattggctgctgcatag

SEQ ID NO: 6541 - RNA, 20 nt, Homo sapiens
  source 1..20: mol_type = genomic RNA
aacattggctgctgcataga

SEQ ID NO: 6542 - RNA, 20 nt, Homo sapiens
  source 1..20: mol_type = genomic RNA
acattggctgctgcatagag

SEQ ID NO: 6543 - RNA, 20 nt, Homo sapiens
  source 1..20: mol_type = genomic RNA
cattggctgctgcatagaga

SEQ ID NO: 6544 - RNA, 20 nt, Homo sapiens
  source 1..20: mol_type = genomic RNA
attggctgctgcatagagaa

SEQ ID NO: 6545 - RNA, 20 nt, Homo sapiens
  source 1..20: mol_type = genomic RNA
ttggctgctgcatagagaac

SEQ ID NO: 6546 - RNA, 20 nt, Homo sapiens
  source 1..20: mol_type = genomic RNA
tggctgctgcatagagaacg

SEQ ID NO: 6547 - RNA, 20 nt, Homo sapiens
  source 1..20: mol_type = genomic RNA
ggctgctgcatagagaacgt

SEQ ID NO: 6548 - RNA, 20 nt, Homo sapiens
  source 1..20: mol_type = genomic RNA
gctgctgcatagagaacgtg

SEQ ID NO: 6549 - RNA, 20 nt, Homo sapiens
  source 1..20: mol_type = genomic RNA
ctgctgcatagagaacgtgc

SEQ ID NO: 6550 - RNA, 20 nt, Homo sapiens
  source 1..20: mol_type = genomic RNA
tgctgcatagagaacgtgct

SEQ ID NO: 6551 - RNA, 20 nt, Homo sapiens
  source 1..20: mol_type = genomic RNA
gctgcatagagaacgtgctt

SEQ ID NO: 6552 - RNA, 20 nt, Homo sapiens
  source 1..20: mol_type = genomic RNA
ctgcatagagaacgtgcttc

SEQ ID NO: 6553 - RNA, 20 nt, Homo sapiens
  source 1..20: mol_type = genomic RNA
tgcatagagaacgtgcttct

SEQ ID NO: 6554 - RNA, 20 nt, Homo sapiens
  source 1..20: mol_type = genomic RNA
gcatagagaacgtgcttctg

SEQ ID NO: 6555 - RNA, 20 nt, Homo sapiens
  source 1..20: mol_type = genomic RNA
catagagaacgtgcttctgc

SEQ ID NO: 6556 - RNA, 20 nt, Homo sapiens
  source 1..20: mol_type = genomic RNA
atagagaacgtgcttctgca

SEQ ID NO: 6557 - RNA, 20 nt, Homo sapiens
  source 1..20: mol_type = genomic RNA
tagagaacgtgcttctgcag

SEQ ID NO: 6558 - RNA, 20 nt, Homo sapiens
  source 1..20: mol_type = genomic RNA
agagaacgtgcttctgcagc

SEQ ID NO: 6559 - RNA, 20 nt, Homo sapiens
  source 1..20: mol_type = genomic RNA
gagaacgtgcttctgcagca

SEQ ID NO: 6560 - RNA, 20 nt, Homo sapiens
  source 1..20: mol_type = genomic RNA
agaacgtgcttctgcagcag

SEQ ID NO: 6561 - RNA, 20 nt, Homo sapiens
  source 1..20: mol_type = genomic RNA
gaacgtgcttctgcagcaga

SEQ ID NO: 6562 - RNA, 20 nt, Homo sapiens
  source 1..20: mol_type = genomic RNA
aacgtgcttctgcagcagaa

SEQ ID NO: 6563 - RNA, 20 nt, Homo sapiens
  source 1..20: mol_type = genomic RNA
acgtgcttctgcagcagaac

SEQ ID NO: 6564 - RNA, 20 nt, Homo sapiens
  source 1..20: mol_type = genomic RNA
cgtgcttctgcagcagaacc

SEQ ID NO: 6565 - RNA, 20 nt, Homo sapiens
  source 1..20: mol_type = genomic RNA
gtgcttctgcagcagaacct

SEQ ID NO: 6566 - RNA, 20 nt, Homo sapiens
  source 1..20: mol_type = genomic RNA
tgcttctgcagcagaacctg

SEQ ID NO: 6567 - RNA, 20 nt, Homo sapiens
  source 1..20: mol_type = genomic RNA
gcttctgcagcagaacctga

SEQ ID NO: 6568 - RNA, 20 nt, Homo sapiens
  source 1..20: mol_type = genomic RNA
cttctgcagcagaacctgac

SEQ ID NO: 6569 - RNA, 20 nt, Homo sapiens
  source 1..20: mol_type = genomic RNA
ttctgcagcagaacctgact

SEQ ID NO: 6570 - RNA, 20 nt, Homo sapiens
  source 1..20: mol_type = genomic RNA
tctgcagcagaacctgactg

SEQ ID NO: 6571 - RNA, 20 nt, Homo sapiens
  source 1..20: mol_type = genomic RNA
ctgcagcagaacctgactgt

SEQ ID NO: 6572 - RNA, 20 nt, Homo sapiens
  source 1..20: mol_type = genomic RNA
tgcagcagaacctgactgtc

SEQ ID NO: 6573 - RNA, 20 nt, Homo sapiens
  source 1..20: mol_type = genomic RNA
gcagcagaacctgactgtcg

SEQ ID NO: 6574 - RNA, 20 nt, Homo sapiens
  source 1..20: mol_type = genomic RNA
cagcagaacctgactgtcgg

SEQ ID NO: 6575 - RNA, 20 nt, Homo sapiens
  source 1..20: mol_type = genomic RNA
agcagaacctgactgtcggc

SEQ ID NO: 6576 - RNA, 20 nt, Homo sapiens
  source 1..20: mol_type = genomic RNA
gcagaacctgactgtcggca

SEQ ID NO: 6577 - RNA, 20 nt, Homo sapiens
  source 1..20: mol_type = genomic RNA
cagaacctgactgtcggcag

SEQ ID NO: 6578 - RNA, 20 nt, Homo sapiens
  source 1..20: mol_type = genomic RNA
agaacctgactgtcggcagc

SEQ ID NO: 6579 - RNA, 20 nt, Homo sapiens
  source 1..20: mol_type = genomic RNA
gaacctgactgtcggcagcc

SEQ ID NO: 6580 - RNA, 20 nt, Homo sapiens
  source 1..20: mol_type = genomic RNA
aacctgactgtcggcagcca

SEQ ID NO: 6581 - RNA, 20 nt, Homo sapiens
  source 1..20: mol_type = genomic RNA
acctgactgtcggcagccag

SEQ ID NO: 6582 - RNA, 20 nt, Homo sapiens
  source 1..20: mol_type = genomic RNA
cctgactgtcggcagccaga

SEQ ID NO: 6583 - RNA, 20 nt, Homo sapiens
  source 1..20: mol_type = genomic RNA
ctgactgtcggcagccagac

SEQ ID NO: 6584 - RNA, 20 nt, Homo sapiens
  source 1..20: mol_type = genomic RNA
tgactgtcggcagccagaca

SEQ ID NO: 6585 - RNA, 20 nt, Homo sapiens
  source 1..20: mol_type = genomic RNA
gactgtcggcagccagacag

SEQ ID NO: 6586 - RNA, 20 nt, Homo sapiens
  source 1..20: mol_type = genomic RNA
actgtcggcagccagacagg

SEQ ID NO: 6587 - RNA, 20 nt, Homo sapiens
  source 1..20: mol_type = genomic RNA
ctgtcggcagccagacagga

SEQ ID NO: 6588 - RNA, 20 nt, Homo sapiens
  source 1..20: mol_type = genomic RNA
tgtcggcagccagacaggaa

SEQ ID NO: 6589 - RNA, 20 nt, Homo sapiens
  source 1..20: mol_type = genomic RNA
gtcggcagccagacaggaaa

SEQ ID NO: 6590 - RNA, 20 nt, Homo sapiens
  source 1..20: mol_type = genomic RNA
tcggcagccagacaggaaat

SEQ ID NO: 6591 - RNA, 20 nt, Homo sapiens
  source 1..20: mol_type = genomic RNA
cggcagccagacaggaaatg

SEQ ID NO: 6592 - RNA, 20 nt, Homo sapiens
  source 1..20: mol_type = genomic RNA
ggcagccagacaggaaatga

SEQ ID NO: 6593 - RNA, 20 nt, Homo sapiens
  source 1..20: mol_type = genomic RNA
gcagccagacaggaaatgac

SEQ ID NO: 6594 - RNA, 20 nt, Homo sapiens
  source 1..20: mol_type = genomic RNA
cagccagacaggaaatgaca

SEQ ID NO: 6595 - RNA, 20 nt, Homo sapiens
  source 1..20: mol_type = genomic RNA
agccagacaggaaatgacat

SEQ ID NO: 6596 - RNA, 20 nt, Homo sapiens
  source 1..20: mol_type = genomic RNA
gccagacaggaaatgacatc

SEQ ID NO: 6597 - RNA, 20 nt, Homo sapiens
  source 1..20: mol_type = genomic RNA
ccagacaggaaatgacatcg

SEQ ID NO: 6598 - RNA, 20 nt, Homo sapiens
  source 1..20: mol_type = genomic RNA
cagacaggaaatgacatcgg

SEQ ID NO: 6599 - RNA, 20 nt, Homo sapiens
  source 1..20: mol_type = genomic RNA
agacaggaaatgacatcgga

SEQ ID NO: 6600 - RNA, 20 nt, Homo sapiens
  source 1..20: mol_type = genomic RNA
gacaggaaatgacatcggag

SEQ ID NO: 6601 - RNA, 20 nt, Homo sapiens
  source 1..20: mol_type = genomic RNA
acaggaaatgacatcggaga

SEQ ID NO: 6602 - RNA, 20 nt, Homo sapiens
  source 1..20: mol_type = genomic RNA
caggaaatgacatcggagag

SEQ ID NO: 6603 - RNA, 20 nt, Homo sapiens
  source 1..20: mol_type = genomic RNA
aggaaatgacatcggagaga

SEQ ID NO: 6604 - RNA, 20 nt, Homo sapiens
  source 1..20: mol_type = genomic RNA
ggaaatgacatcggagagag

SEQ ID NO: 6605 - RNA, 20 nt, Homo sapiens
  source 1..20: mol_type = genomic RNA
gaaatgacatcggagagaga

SEQ ID NO: 6606 - RNA, 20 nt, Homo sapiens
  source 1..20: mol_type = genomic RNA
aaatgacatcggagagagag

SEQ ID NO: 6607 - RNA, 20 nt, Homo sapiens
  source 1..20: mol_type = genomic RNA
aatgacatcggagagagaga

SEQ ID NO: 6608 - RNA, 20 nt, Homo sapiens
  source 1..20: mol_type = genomic RNA
atgacatcggagagagagac

SEQ ID NO: 6609 - RNA, 20 nt, Homo sapiens
  source 1..20: mol_type = genomic RNA
tgacatcggagagagagaca

SEQ ID NO: 6610 - RNA, 20 nt, Homo sapiens
  source 1..20: mol_type = genomic RNA
gacatcggagagagagacaa

SEQ ID NO: 6611 - RNA, 20 nt, Homo sapiens
  source 1..20: mol_type = genomic RNA
acatcggagagagagacaag

SEQ ID NO: 6612 - RNA, 20 nt, Homo sapiens
  source 1..20: mol_type = genomic RNA
catcggagagagagacaaga

SEQ ID NO: 6613 - RNA, 20 nt, Homo sapiens
  source 1..20: mol_type = genomic RNA
atcggagagagagacaagat

SEQ ID NO: 6614 - RNA, 20 nt, Homo sapiens
  source 1..20: mol_type = genomic RNA
tcggagagagagacaagatc

SEQ ID NO: 6615 - RNA, 20 nt, Homo sapiens
  source 1..20: mol_type = genomic RNA
cggagagagagacaagatca

SEQ ID NO: 6616 - RNA, 20 nt, Homo sapiens
  source 1..20: mol_type = genomic RNA
ggagagagagacaagatcac

SEQ ID NO: 6617 - RNA, 20 nt, Homo sapiens
  source 1..20: mol_type = genomic RNA
gagagagagacaagatcaca

SEQ ID NO: 6618 - RNA, 20 nt, Homo sapiens
  source 1..20: mol_type = genomic RNA
agagagagacaagatcacag

SEQ ID NO: 6619 - RNA, 20 nt, Homo sapiens
  source 1..20: mol_type = genomic RNA
gagagagacaagatcacaga

SEQ ID NO: 6620 - RNA, 20 nt, Homo sapiens
  source 1..20: mol_type = genomic RNA
agagagacaagatcacagag

SEQ ID NO: 6621 - RNA, 20 nt, Homo sapiens
  source 1..20: mol_type = genomic RNA
gagagacaagatcacagaga

SEQ ID NO: 6622 - RNA, 20 nt, Homo sapiens
  source 1..20: mol_type = genomic RNA
agagacaagatcacagagaa

SEQ ID NO: 6623 - RNA, 20 nt, Homo sapiens
  source 1..20: mol_type = genomic RNA
gagacaagatcacagagaat

SEQ ID NO: 6624 - RNA, 20 nt, Homo sapiens
  source 1..20: mol_type = genomic RNA
agacaagatcacagagaatc

SEQ ID NO: 6625 - RNA, 20 nt, Homo sapiens
  source 1..20: mol_type = genomic RNA
gacaagatcacagagaatcc

SEQ ID NO: 6626 - RNA, 20 nt, Homo sapiens
  source 1..20: mol_type = genomic RNA
acaagatcacagagaatcca

SEQ ID NO: 6627 - RNA, 20 nt, Homo sapiens
  source 1..20: mol_type = genomic RNA
caagatcacagagaatccag

SEQ ID NO: 6628 - RNA, 20 nt, Homo sapiens
  source 1..20: mol_type = genomic RNA
aagatcacagagaatccagt

SEQ ID NO: 6629 - RNA, 20 nt, Homo sapiens
  source 1..20: mol_type = genomic RNA
agatcacagagaatccagtc

SEQ ID NO: 6630 - RNA, 20 nt, Homo sapiens
  source 1..20: mol_type = genomic RNA
gatcacagagaatccagtca

SEQ ID NO: 6631 - RNA, 20 nt, Homo sapiens
  source 1..20: mol_type = genomic RNA
atcacagagaatccagtcag

SEQ ID NO: 6632 - RNA, 20 nt, Homo sapiens
  source 1..20: mol_type = genomic RNA
tcacagagaatccagtcagt

SEQ ID NO: 6633 - RNA, 20 nt, Homo sapiens
  source 1..20: mol_type = genomic RNA
cacagagaatccagtcagta

SEQ ID NO: 6634 - RNA, 20 nt, Homo sapiens
  source 1..20: mol_type = genomic RNA
acagagaatccagtcagtac

SEQ ID NO: 6635 - RNA, 20 nt, Homo sapiens
  source 1..20: mol_type = genomic RNA
cagagaatccagtcagtacc

SEQ ID NO: 6636 - RNA, 20 nt, Homo sapiens
  source 1..20: mol_type = genomic RNA
agagaatccagtcagtaccg

SEQ ID NO: 6637 - RNA, 20 nt, Homo sapiens
  source 1..20: mol_type = genomic RNA
gagaatccagtcagtaccgg

SEQ ID NO: 6638 - RNA, 20 nt, Homo sapiens
  source 1..20: mol_type = genomic RNA
agaatccagtcagtaccggc

SEQ ID NO: 6639 - RNA, 20 nt, Homo sapiens
  source 1..20: mol_type = genomic RNA
gaatccagtcagtaccggcg

SEQ ID NO: 6640 - RNA, 20 nt, Homo sapiens
  source 1..20: mol_type = genomic RNA
aatccagtcagtaccggcga

SEQ ID NO: 6641 - RNA, 20 nt, Homo sapiens
  source 1..20: mol_type = genomic RNA
atccagtcagtaccggcgag

SEQ ID NO: 6642 - RNA, 20 nt, Homo sapiens
  source 1..20: mol_type = genomic RNA
tccagtcagtaccggcgaga

SEQ ID NO: 6643 - RNA, 20 nt, Homo sapiens
  source 1..20: mol_type = genomic RNA
ccagtcagtaccggcgagaa

SEQ ID NO: 6644 - RNA, 20 nt, Homo sapiens
  source 1..20: mol_type = genomic RNA
cagtcagtaccggcgagaaa

SEQ ID NO: 6645 - RNA, 20 nt, Homo sapiens
  source 1..20: mol_type = genomic RNA
agtcagtaccggcgagaaaa

SEQ ID NO: 6646 - RNA, 20 nt, Homo sapiens
  source 1..20: mol_type = genomic RNA
gtcagtaccggcgagaaaaa

SEQ ID NO: 6647 - RNA, 20 nt, Homo sapiens
  source 1..20: mol_type = genomic RNA
tcagtaccggcgagaaaaac

SEQ ID NO: 6648 - RNA, 20 nt, Homo sapiens
  source 1..20: mol_type = genomic RNA
cagtaccggcgagaaaaacg

SEQ ID NO: 6649 - RNA, 20 nt, Homo sapiens
  source 1..20: mol_type = genomic RNA
agtaccggcgagaaaaacgc

SEQ ID NO: 6650 - RNA, 20 nt, Homo sapiens
  source 1..20: mol_type = genomic RNA
gtaccggcgagaaaaacgcg

SEQ ID NO: 6651 - RNA, 20 nt, Homo sapiens
  source 1..20: mol_type = genomic RNA
taccggcgagaaaaacgcgg

SEQ ID NO: 6652 - RNA, 20 nt, Homo sapiens
  source 1..20: mol_type = genomic RNA
accggcgagaaaaacgcggc

SEQ ID NO: 6653 - RNA, 20 nt, Homo sapiens
  source 1..20: mol_type = genomic RNA
ccggcgagaaaaacgcggcc

SEQ ID NO: 6654 - RNA, 20 nt, Homo sapiens
  source 1..20: mol_type = genomic RNA
cggcgagaaaaacgcggcca

SEQ ID NO: 6655 - RNA, 20 nt, Homo sapiens
  source 1..20: mol_type = genomic RNA
ggcgagaaaaacgcggccac

SEQ ID NO: 6656 - RNA, 20 nt, Homo sapiens
  source 1..20: mol_type = genomic RNA
gcgagaaaaacgcggccacg

SEQ ID NO: 6657 - RNA, 20 nt, Homo sapiens
  source 1..20: mol_type = genomic RNA
cgagaaaaacgcggccacgt

SEQ ID NO: 6658 - RNA, 20 nt, Homo sapiens
  source 1..20: mol_type = genomic RNA
gagaaaaacgcggccacgtg

SEQ ID NO: 6659 - RNA, 20 nt, Homo sapiens
  source 1..20: mol_type = genomic RNA
agaaaaacgcggccacgtgg

SEQ ID NO: 6660 - RNA, 20 nt, Homo sapiens
  source 1..20: mol_type = genomic RNA
gaaaaacgcggccacgtgga

SEQ ID NO: 6661 - RNA, 20 nt, Homo sapiens
  source 1..20: mol_type = genomic RNA
aaaaacgcggccacgtggag

SEQ ID NO: 6662 - RNA, 20 nt, Homo sapiens
  source 1..20: mol_type = genomic RNA
aaaacgcggccacgtggagc

SEQ ID NO: 6663 - RNA, 20 nt, Homo sapiens
  source 1..20: mol_type = genomic RNA
aaacgcggccacgtggagca

SEQ ID NO: 6664 - RNA, 20 nt, Homo sapiens
  source 1..20: mol_type = genomic RNA
aacgcggccacgtggagcat

SEQ ID NO: 6665 - RNA, 20 nt, Homo sapiens
  source 1..20: mol_type = genomic RNA
acgcggccacgtggagcatc

SEQ ID NO: 6666 - RNA, 20 nt, Homo sapiens
  source 1..20: mol_type = genomic RNA
cgcggccacgtggagcatcc

SEQ ID NO: 6667 - RNA, 20 nt, Homo sapiens
  source 1..20: mol_type = genomic RNA
gcggccacgtggagcatcct

SEQ ID NO: 6668 - RNA, 20 nt, Homo sapiens
  source 1..20: mol_type = genomic RNA
cggccacgtggagcatcctg

SEQ ID NO: 6669 - RNA, 20 nt, Homo sapiens
  source 1..20: mol_type = genomic RNA
ggccacgtggagcatcctgg

SEQ ID NO: 6670 - RNA, 20 nt, Homo sapiens
  source 1..20: mol_type = genomic RNA
gccacgtggagcatcctggc

SEQ ID NO: 6671 - RNA, 20 nt, Homo sapiens
  source 1..20: mol_type = genomic RNA
ccacgtggagcatcctggct

SEQ ID NO: 6672 - RNA, 20 nt, Homo sapiens
  source 1..20: mol_type = genomic RNA
cacgtggagcatcctggctg

SEQ ID NO: 6673 - RNA, 20 nt, Homo sapiens
  source 1..20: mol_type = genomic RNA
acgtggagcatcctggctgt

SEQ ID NO: 6674 - RNA, 20 nt, Homo sapiens
  source 1..20: mol_type = genomic RNA
cgtggagcatcctggctgtc

SEQ ID NO: 6675 - RNA, 20 nt, Homo sapiens
  source 1..20: mol_type = genomic RNA
gtggagcatcctggctgtcc

SEQ ID NO: 6676 - RNA, 20 nt, Homo sapiens
  source 1..20: mol_type = genomic RNA
tggagcatcctggctgtcct

SEQ ID NO: 6677 - RNA, 20 nt, Homo sapiens
  source 1..20: mol_type = genomic RNA
ggagcatcctggctgtcctg

SEQ ID NO: 6678 - RNA, 20 nt, Homo sapiens
  source 1..20: mol_type = genomic RNA
gagcatcctggctgtcctgt

SEQ ID NO: 6679 - RNA, 20 nt, Homo sapiens
  source 1..20: mol_type = genomic RNA
agcatcctggctgtcctgtg

SEQ ID NO: 6680 - RNA, 20 nt, Homo sapiens
  source 1..20: mol_type = genomic RNA
gcatcctggctgtcctgtgc

SEQ ID NO: 6681 - RNA, 20 nt, Homo sapiens
  source 1..20: mol_type = genomic RNA
catcctggctgtcctgtgcc

SEQ ID NO: 6682 - RNA, 20 nt, Homo sapiens
  source 1..20: mol_type = genomic RNA
atcctggctgtcctgtgcct

SEQ ID NO: 6683 - RNA, 20 nt, Homo sapiens
  source 1..20: mol_type = genomic RNA
tcctggctgtcctgtgcctg

SEQ ID NO: 6684 - RNA, 20 nt, Homo sapiens
  source 1..20: mol_type = genomic RNA
cctggctgtcctgtgcctgc

SEQ ID NO: 6685 - RNA, 20 nt, Homo sapiens
  source 1..20: mol_type = genomic RNA
ctggctgtcctgtgcctgct

SEQ ID NO: 6686 - RNA, 20 nt, Homo sapiens
  source 1..20: mol_type = genomic RNA
tggctgtcctgtgcctgctt

SEQ ID NO: 6687 - RNA, 20 nt, Homo sapiens
  source 1..20: mol_type = genomic RNA
ggctgtcctgtgcctgcttg

SEQ ID NO: 6688 - RNA, 20 nt, Homo sapiens
  source 1..20: mol_type = genomic RNA
gctgtcctgtgcctgcttgt

SEQ ID NO: 6689 - RNA, 20 nt, Homo sapiens
  source 1..20: mol_type = genomic RNA
ctgtcctgtgcctgcttgtg

SEQ ID NO: 6690 - RNA, 20 nt, Homo sapiens
  source 1..20: mol_type = genomic RNA
tgtcctgtgcctgcttgtgg

SEQ ID NO: 6691 - RNA, 20 nt, Homo sapiens
  source 1..20: mol_type = genomic RNA
gtcctgtgcctgcttgtggt

SEQ ID NO: 6692 - RNA, 20 nt, Homo sapiens
  source 1..20: mol_type = genomic RNA
tcctgtgcctgcttgtggtc

SEQ ID NO: 6693 - RNA, 20 nt, Homo sapiens
  source 1..20: mol_type = genomic RNA
cctgtgcctgcttgtggtcg

SEQ ID NO: 6694 - RNA, 20 nt, Homo sapiens
  source 1..20: mol_type = genomic RNA
ctgtgcctgcttgtggtcgt

SEQ ID NO: 6695 - RNA, 20 nt, Homo sapiens
  source 1..20: mol_type = genomic RNA
tgtgcctgcttgtggtcgtg

SEQ ID NO: 6696 - RNA, 20 nt, Homo sapiens
  source 1..20: mol_type = genomic RNA
gtgcctgcttgtggtcgtgg

SEQ ID NO: 6697 - RNA, 20 nt, Homo sapiens
  source 1..20: mol_type = genomic RNA
tgcctgcttgtggtcgtggc

SEQ ID NO: 6698 - RNA, 20 nt, Homo sapiens
  source 1..20: mol_type = genomic RNA
gcctgcttgtggtcgtggcg

SEQ ID NO: 6699 - RNA, 20 nt, Homo sapiens
  source 1..20: mol_type = genomic RNA
cctgcttgtggtcgtggcgg

SEQ ID NO: 6700 - RNA, 20 nt, Homo sapiens
  source 1..20: mol_type = genomic RNA
ctgcttgtggtcgtggcggt

SEQ ID NO: 6701 - RNA, 20 nt, Homo sapiens
  source 1..20: mol_type = genomic RNA
tgcttgtggtcgtggcggtg

SEQ ID NO: 6702 - RNA, 20 nt, Homo sapiens
  source 1..20: mol_type = genomic RNA
gcttgtggtcgtggcggtgg

SEQ ID NO: 6703 - RNA, 20 nt, Homo sapiens
  source 1..20: mol_type = genomic RNA
cttgtggtcgtggcggtggc

SEQ ID NO: 6704 - RNA, 20 nt, Homo sapiens
  source 1..20: mol_type = genomic RNA
ttgtggtcgtggcggtggcc

SEQ ID NO: 6705 - RNA, 20 nt, Homo sapiens
  source 1..20: mol_type = genomic RNA
tgtggtcgtggcggtggcca

SEQ ID NO: 6706 - RNA, 20 nt, Homo sapiens
  source 1..20: mol_type = genomic RNA
gtggtcgtggcggtggccat

SEQ ID NO: 6707 - RNA, 20 nt, Homo sapiens
  source 1..20: mol_type = genomic RNA
tggtcgtggcggtggccata

SEQ ID NO: 6708 - RNA, 20 nt, Homo sapiens
  source 1..20: mol_type = genomic RNA
ggtcgtggcggtggccatag

SEQ ID NO: 6709 - RNA, 20 nt, Homo sapiens
  source 1..20: mol_type = genomic RNA
gtcgtggcggtggccatagg

SEQ ID NO: 6710 - RNA, 20 nt, Homo sapiens
  source 1..20: mol_type = genomic RNA
tcgtggcggtggccataggc

SEQ ID NO: 6711 - RNA, 20 nt, Homo sapiens
  source 1..20: mol_type = genomic RNA
cgtggcggtggccataggct

SEQ ID NO: 6712 - RNA, 20 nt, Homo sapiens
  source 1..20: mol_type = genomic RNA
gtggcggtggccataggctg

SEQ ID NO: 6713 - RNA, 20 nt, Homo sapiens
  source 1..20: mol_type = genomic RNA
tggcggtggccataggctgg

SEQ ID NO: 6714 - RNA, 20 nt, Homo sapiens
  source 1..20: mol_type = genomic RNA
ggcggtggccataggctggg

SEQ ID NO: 6715 - RNA, 20 nt, Homo sapiens
  source 1..20: mol_type = genomic RNA
gcggtggccataggctgggt

SEQ ID NO: 6716 - RNA, 20 nt, Homo sapiens
  source 1..20: mol_type = genomic RNA
cggtggccataggctgggtg

SEQ ID NO: 6717 - RNA, 20 nt, Homo sapiens
  source 1..20: mol_type = genomic RNA
ggtggccataggctgggtgt

SEQ ID NO: 6718 - RNA, 20 nt, Homo sapiens
  source 1..20: mol_type = genomic RNA
gtggccataggctgggtgtg

SEQ ID NO: 6719 - RNA, 20 nt, Homo sapiens
  source 1..20: mol_type = genomic RNA
tggccataggctgggtgtgc

SEQ ID NO: 6720 - RNA, 20 nt, Homo sapiens
  source 1..20: mol_type = genomic RNA
ggccataggctgggtgtgca

SEQ ID NO: 6721 - RNA, 20 nt, Homo sapiens
  source 1..20: mol_type = genomic RNA
gccataggctgggtgtgcag

SEQ ID NO: 6722 - RNA, 20 nt, Homo sapiens
  source 1..20: mol_type = genomic RNA
ccataggctgggtgtgcagg

SEQ ID NO: 6723 - RNA, 20 nt, Homo sapiens
  source 1..20: mol_type = genomic RNA
cataggctgggtgtgcaggg

SEQ ID NO: 6724 - RNA, 20 nt, Homo sapiens
  source 1..20: mol_type = genomic RNA
ataggctgggtgtgcaggga

SEQ ID NO: 6725 - RNA, 20 nt, Homo sapiens
  source 1..20: mol_type = genomic RNA
taggctgggtgtgcagggac

SEQ ID NO: 6726 - RNA, 20 nt, Homo sapiens
  source 1..20: mol_type = genomic RNA
aggctgggtgtgcagggacc

SEQ ID NO: 6727 - RNA, 20 nt, Homo sapiens
  source 1..20: mol_type = genomic RNA
ggctgggtgtgcagggaccg

SEQ ID NO: 6728 - RNA, 20 nt, Homo sapiens
  source 1..20: mol_type = genomic RNA
gctgggtgtgcagggaccga

SEQ ID NO: 6729 - RNA, 20 nt, Homo sapiens
  source 1..20: mol_type = genomic RNA
ctgggtgtgcagggaccgat

SEQ ID NO: 6730 - RNA, 20 nt, Homo sapiens
  source 1..20: mol_type = genomic RNA
tgggtgtgcagggaccgatg

SEQ ID NO: 6731 - RNA, 20 nt, Homo sapiens
  source 1..20: mol_type = genomic RNA
gggtgtgcagggaccgatgc

SEQ ID NO: 6732 - RNA, 20 nt, Homo sapiens
  source 1..20: mol_type = genomic RNA
ggtgtgcagggaccgatgcc

SEQ ID NO: 6733 - RNA, 20 nt, Homo sapiens
  source 1..20: mol_type = genomic RNA
gtgtgcagggaccgatgcct

SEQ ID NO: 6734 - RNA, 20 nt, Homo sapiens
  source 1..20: mol_type = genomic RNA
tgtgcagggaccgatgcctc

SEQ ID NO: 6735 - RNA, 20 nt, Homo sapiens
  source 1..20: mol_type = genomic RNA
gtgcagggaccgatgcctcc

SEQ ID NO: 6736 - RNA, 20 nt, Homo sapiens
  source 1..20: mol_type = genomic RNA
tgcagggaccgatgcctcca

SEQ ID NO: 6737 - RNA, 20 nt, Homo sapiens
  source 1..20: mol_type = genomic RNA
gcagggaccgatgcctccaa

SEQ ID NO: 6738 - RNA, 20 nt, Homo sapiens
  source 1..20: mol_type = genomic RNA
cagggaccgatgcctccaac

SEQ ID NO: 6739 - RNA, 20 nt, Homo sapiens
  source 1..20: mol_type = genomic RNA
agggaccgatgcctccaaca

SEQ ID NO: 6740 - RNA, 20 nt, Homo sapiens
  source 1..20: mol_type = genomic RNA
gggaccgatgcctccaacac

SEQ ID NO: 6741 - RNA, 20 nt, Homo sapiens
  source 1..20: mol_type = genomic RNA
ggaccgatgcctccaacaca

SEQ ID NO: 6742 - RNA, 20 nt, Homo sapiens
  source 1..20: mol_type = genomic RNA
gaccgatgcctccaacacag

SEQ ID NO: 6743 - RNA, 20 nt, Homo sapiens
  source 1..20: mol_type = genomic RNA
accgatgcctccaacacagc

SEQ ID NO: 6744 - RNA, 20 nt, Homo sapiens
  source 1..20: mol_type = genomic RNA
ccgatgcctccaacacagct

SEQ ID NO: 6745 - RNA, 20 nt, Homo sapiens
  source 1..20: mol_type = genomic RNA
cgatgcctccaacacagcta

SEQ ID NO: 6746 - RNA, 20 nt, Homo sapiens
  source 1..20: mol_type = genomic RNA
gatgcctccaacacagctat

SEQ ID NO: 6747 - RNA, 20 nt, Homo sapiens
  source 1..20: mol_type = genomic RNA
atgcctccaacacagctatg

SEQ ID NO: 6748 - RNA, 20 nt, Homo sapiens
  source 1..20: mol_type = genomic RNA
tgcctccaacacagctatgc

SEQ ID NO: 6749 - RNA, 20 nt, Homo sapiens
  source 1..20: mol_type = genomic RNA
gcctccaacacagctatgca

SEQ ID NO: 6750 - RNA, 20 nt, Homo sapiens
  source 1..20: mol_type = genomic RNA
cctccaacacagctatgcag

SEQ ID NO: 6751 - RNA, 20 nt, Homo sapiens
  source 1..20: mol_type = genomic RNA
ctccaacacagctatgcagg

SEQ ID NO: 6752 - RNA, 20 nt, Homo sapiens
  source 1..20: mol_type = genomic RNA
tccaacacagctatgcaggt

SEQ ID NO: 6753 - RNA, 20 nt, Homo sapiens
  source 1..20: mol_type = genomic RNA
ccaacacagctatgcaggtg

SEQ ID NO: 6754 - RNA, 20 nt, Homo sapiens
  source 1..20: mol_type = genomic RNA
caacacagctatgcaggtgc

SEQ ID NO: 6755 - RNA, 20 nt, Homo sapiens
  source 1..20: mol_type = genomic RNA
aacacagctatgcaggtgcc

SEQ ID NO: 6756 - RNA, 20 nt, Homo sapiens
  source 1..20: mol_type = genomic RNA
acacagctatgcaggtgcct

SEQ ID NO: 6757 - RNA, 20 nt, Homo sapiens
  source 1..20: mol_type = genomic RNA
cacagctatgcaggtgcctg

SEQ ID NO: 6758 - RNA, 20 nt, Homo sapiens
  source 1..20: mol_type = genomic RNA
acagctatgcaggtgcctgg

SEQ ID NO: 6759 - RNA, 20 nt, Homo sapiens
  source 1..20: mol_type = genomic RNA
cagctatgcaggtgcctggg

SEQ ID NO: 6760 - RNA, 20 nt, Homo sapiens
  source 1..20: mol_type = genomic RNA
agctatgcaggtgcctgggc

SEQ ID NO: 6761 - RNA, 20 nt, Homo sapiens
  source 1..20: mol_type = genomic RNA
gctatgcaggtgcctgggct

SEQ ID NO: 6762 - RNA, 20 nt, Homo sapiens
  source 1..20: mol_type = genomic RNA
ctatgcaggtgcctgggctg

SEQ ID NO: 6763 - RNA, 20 nt, Homo sapiens
  source 1..20: mol_type = genomic RNA
tatgcaggtgcctgggctgt

SEQ ID NO: 6764 - RNA, 20 nt, Homo sapiens
  source 1..20: mol_type = genomic RNA
atgcaggtgcctgggctgtg

SEQ ID NO: 6765 - RNA, 20 nt, Homo sapiens
  source 1..20: mol_type = genomic RNA
tgcaggtgcctgggctgtga

SEQ ID NO: 6766 - RNA, 20 nt, Homo sapiens
  source 1..20: mol_type = genomic RNA
gcaggtgcctgggctgtgag

SEQ ID NO: 6767 - RNA, 20 nt, Homo sapiens
  source 1..20: mol_type = genomic RNA
caggtgcctgggctgtgagt

SEQ ID NO: 6768 - RNA, 20 nt, Homo sapiens
  source 1..20: mol_type = genomic RNA
aggtgcctgggctgtgagtc

SEQ ID NO: 6769 - RNA, 20 nt, Homo sapiens
  source 1..20: mol_type = genomic RNA
ggtgcctgggctgtgagtcc

SEQ ID NO: 6770 - RNA, 20 nt, Homo sapiens
  source 1..20: mol_type = genomic RNA
gtgcctgggctgtgagtccg

SEQ ID NO: 6771 - RNA, 20 nt, Homo sapiens
  source 1..20: mol_type = genomic RNA
tgcctgggctgtgagtccgg

SEQ ID NO: 6772 - RNA, 20 nt, Homo sapiens
  source 1..20: mol_type = genomic RNA
gcctgggctgtgagtccgga

SEQ ID NO: 6773 - RNA, 20 nt, Homo sapiens
  source 1..20: mol_type = genomic RNA
cctgggctgtgagtccggag

SEQ ID NO: 6774 - RNA, 20 nt, Homo sapiens
  source 1..20: mol_type = genomic RNA
ctgggctgtgagtccggaga

SEQ ID NO: 6775 - RNA, 20 nt, Homo sapiens
  source 1..20: mol_type = genomic RNA
tgggctgtgagtccggagac

SEQ ID NO: 6776 - RNA, 20 nt, Homo sapiens
  source 1..20: mol_type = genomic RNA
gggctgtgagtccggagaca

SEQ ID NO: 6777 - RNA, 20 nt, Homo sapiens
  source 1..20: mol_type = genomic RNA
ggctgtgagtccggagacag

SEQ ID NO: 6778 - RNA, 20 nt, Homo sapiens
  source 1..20: mol_type = genomic RNA
gctgtgagtccggagacaga

SEQ ID NO: 6779 - RNA, 20 nt, Homo sapiens
  source 1..20: mol_type = genomic RNA
ctgtgagtccggagacagag

SEQ ID NO: 6780 - RNA, 20 nt, Homo sapiens
  source 1..20: mol_type = genomic RNA
tgtgagtccggagacagagc

SEQ ID NO: 6781 - RNA, 20 nt, Homo sapiens
  source 1..20: mol_type = genomic RNA
gtgagtccggagacagagct

SEQ ID NO: 6782 - RNA, 20 nt, Homo sapiens
  source 1..20: mol_type = genomic RNA
tgagtccggagacagagctc

SEQ ID NO: 6783 - RNA, 20 nt, Homo sapiens
  source 1..20: mol_type = genomic RNA
gagtccggagacagagctca

SEQ ID NO: 6784 - RNA, 20 nt, Homo sapiens
  source 1..20: mol_type = genomic RNA
agtccggagacagagctcac

SEQ ID NO: 6785 - RNA, 20 nt, Homo sapiens
  source 1..20: mol_type = genomic RNA
gtccggagacagagctcact

SEQ ID NO: 6786 - RNA, 20 nt, Homo sapiens
  source 1..20: mol_type = genomic RNA
tccggagacagagctcactg

SEQ ID NO: 6787 - RNA, 20 nt, Homo sapiens
  source 1..20: mol_type = genomic RNA
ccggagacagagctcactgg

SEQ ID NO: 6788 - RNA, 20 nt, Homo sapiens
  source 1..20: mol_type = genomic RNA
cggagacagagctcactggt

SEQ ID NO: 6789 - RNA, 20 nt, Homo sapiens
  source 1..20: mol_type = genomic RNA
ggagacagagctcactggtg

SEQ ID NO: 6790 - RNA, 20 nt, Homo sapiens
  source 1..20: mol_type = genomic RNA
gagacagagctcactggtga

SEQ ID NO: 6791 - RNA, 20 nt, Homo sapiens
  source 1..20: mol_type = genomic RNA
agacagagctcactggtgag

SEQ ID NO: 6792 - RNA, 20 nt, Homo sapiens
  source 1..20: mol_type = genomic RNA
gacagagctcactggtgagt

SEQ ID NO: 6793 - RNA, 20 nt, Homo sapiens
  source 1..20: mol_type = genomic RNA
acagagctcactggtgagtt

SEQ ID NO: 6794 - RNA, 20 nt, Homo sapiens
  source 1..20: mol_type = genomic RNA
cagagctcactggtgagttt

SEQ ID NO: 6795 - RNA, 20 nt, Homo sapiens
  source 1..20: mol_type = genomic RNA
agagctcactggtgagtttg

SEQ ID NO: 6796 - RNA, 20 nt, Homo sapiens
  source 1..20: mol_type = genomic RNA
gagctcactggtgagtttgc

SEQ ID NO: 6797 - RNA, 20 nt, Homo sapiens
  source 1..20: mol_type = genomic RNA
agctcactggtgagtttgcc

SEQ ID NO: 6798 - RNA, 20 nt, Homo sapiens
  source 1..20: mol_type = genomic RNA
gctcactggtgagtttgccg

SEQ ID NO: 6799 - RNA, 20 nt, Homo sapiens
  source 1..20: mol_type = genomic RNA
ctcactggtgagtttgccgt

SEQ ID NO: 6800 - RNA, 20 nt, Homo sapiens
  source 1..20: mol_type = genomic RNA
tcactggtgagtttgccgtg

SEQ ID NO: 6801 - RNA, 20 nt, Homo sapiens
  source 1..20: mol_type = genomic RNA
cactggtgagtttgccgtgg

SEQ ID NO: 6802 - RNA, 20 nt, Homo sapiens
  source 1..20: mol_type = genomic RNA
actggtgagtttgccgtggg

SEQ ID NO: 6803 - RNA, 20 nt, Homo sapiens
  source 1..20: mol_type = genomic RNA
ctggtgagtttgccgtggga

SEQ ID NO: 6804 - RNA, 20 nt, Homo sapiens
  source 1..20: mol_type = genomic RNA
tggtgagtttgccgtgggaa

SEQ ID NO: 6805 - RNA, 20 nt, Homo sapiens
  source 1..20: mol_type = genomic RNA
ggtgagtttgccgtgggaag

SEQ ID NO: 6806 - RNA, 20 nt, Homo sapiens
  source 1..20: mol_type = genomic RNA
gtgagtttgccgtgggaagc

SEQ ID NO: 6807 - RNA, 20 nt, Homo sapiens
  source 1..20: mol_type = genomic RNA
tgagtttgccgtgggaagca

SEQ ID NO: 6808 - RNA, 20 nt, Homo sapiens
  source 1..20: mol_type = genomic RNA
gagtttgccgtgggaagcag

SEQ ID NO: 6809 - RNA, 20 nt, Homo sapiens
  source 1..20: mol_type = genomic RNA
agtttgccgtgggaagcagc

SEQ ID NO: 6810 - RNA, 20 nt, Homo sapiens
  source 1..20: mol_type = genomic RNA
gtttgccgtgggaagcagca

SEQ ID NO: 6811 - RNA, 20 nt, Homo sapiens
  source 1..20: mol_type = genomic RNA
tttgccgtgggaagcagcag

SEQ ID NO: 6812 - RNA, 20 nt, Homo sapiens
  source 1..20: mol_type = genomic RNA
ttgccgtgggaagcagcagg

SEQ ID NO: 6813 - RNA, 20 nt, Homo sapiens
  source 1..20: mol_type = genomic RNA
tgccgtgggaagcagcaggt

SEQ ID NO: 6814 - RNA, 20 nt, Homo sapiens
  source 1..20: mol_type = genomic RNA
gccgtgggaagcagcaggtt

SEQ ID NO: 6815 - RNA, 20 nt, Homo sapiens
  source 1..20: mol_type = genomic RNA
ccgtgggaagcagcaggttc

SEQ ID NO: 6816 - RNA, 20 nt, Homo sapiens
  source 1..20: mol_type = genomic RNA
cgtgggaagcagcaggttct

SEQ ID NO: 6817 - RNA, 20 nt, Homo sapiens
  source 1..20: mol_type = genomic RNA
gtgggaagcagcaggttctg

SEQ ID NO: 6818 - RNA, 20 nt, Homo sapiens
  source 1..20: mol_type = genomic RNA
tgggaagcagcaggttctgg

SEQ ID NO: 6819 - RNA, 20 nt, Homo sapiens
  source 1..20: mol_type = genomic RNA
gggaagcagcaggttctggg

SEQ ID NO: 6820 - RNA, 20 nt, Homo sapiens
  source 1..20: mol_type = genomic RNA
ggaagcagcaggttctgggg

SEQ ID NO: 6821 - RNA, 20 nt, Homo sapiens
  source 1..20: mol_type = genomic RNA
gaagcagcaggttctggggg

SEQ ID NO: 6822 - RNA, 20 nt, Homo sapiens
  source 1..20: mol_type = genomic RNA
aagcagcaggttctgggggg

SEQ ID NO: 6823 - RNA, 20 nt, Homo sapiens
  source 1..20: mol_type = genomic RNA
agcagcaggttctggggggc

SEQ ID NO: 6824 - RNA, 20 nt, Homo sapiens
  source 1..20: mol_type = genomic RNA
gcagcaggttctggggggcc

SEQ ID NO: 6825 - RNA, 20 nt, Homo sapiens
  source 1..20: mol_type = genomic RNA
cagcaggttctggggggccc

SEQ ID NO: 6826 - RNA, 20 nt, Homo sapiens
  source 1..20: mol_type = genomic RNA
agcaggttctggggggccca

SEQ ID NO: 6827 - RNA, 20 nt, Homo sapiens
  source 1..20: mol_type = genomic RNA
gcaggttctggggggcccag

SEQ ID NO: 6828 - RNA, 20 nt, Homo sapiens
  source 1..20: mol_type = genomic RNA
caggttctggggggcccagg

SEQ ID NO: 6829 - RNA, 20 nt, Homo sapiens
  source 1..20: mol_type = genomic RNA
aggttctggggggcccaggg

SEQ ID NO: 6830 - RNA, 20 nt, Homo sapiens
  source 1..20: mol_type = genomic RNA
ggttctggggggcccagggg

SEQ ID NO: 6831 - RNA, 20 nt, Homo sapiens
  source 1..20: mol_type = genomic RNA
gttctggggggcccagggga

SEQ ID NO: 6832 - RNA, 20 nt, Homo sapiens
  source 1..20: mol_type = genomic RNA
ttctggggggcccaggggag

SEQ ID NO: 6833 - RNA, 20 nt, Homo sapiens
  source 1..20: mol_type = genomic RNA
tctggggggcccaggggagg

SEQ ID NO: 6834 - RNA, 20 nt, Homo sapiens
  source 1..20: mol_type = genomic RNA
ctggggggcccaggggaggc

SEQ ID NO: 6835 - RNA, 20 nt, Homo sapiens
  source 1..20: mol_type = genomic RNA
tggggggcccaggggaggct

SEQ ID NO: 6836 - RNA, 20 nt, Homo sapiens
  source 1..20: mol_type = genomic RNA
ggggggcccaggggaggctt

SEQ ID NO: 6837 - RNA, 20 nt, Homo sapiens
  source 1..20: mol_type = genomic RNA
gggggcccaggggaggcttg

SEQ ID NO: 6838 - RNA, 20 nt, Homo sapiens
  source 1..20: mol_type = genomic RNA
ggggcccaggggaggcttgg

SEQ ID NO: 6839 - RNA, 20 nt, Homo sapiens
  source 1..20: mol_type = genomic RNA
gggcccaggggaggcttggc

SEQ ID NO: 6840 - RNA, 20 nt, Homo sapiens
  source 1..20: mol_type = genomic RNA
ggcccaggggaggcttggct

SEQ ID NO: 6841 - RNA, 20 nt, Homo sapiens
  source 1..20: mol_type = genomic RNA
gcccaggggaggcttggctg

SEQ ID NO: 6842 - RNA, 20 nt, Homo sapiens
  source 1..20: mol_type = genomic RNA
cccaggggaggcttggctgc

SEQ ID NO: 6843 - RNA, 20 nt, Homo sapiens
  source 1..20: mol_type = genomic RNA
ccaggggaggcttggctgcc

SEQ ID NO: 6844 - RNA, 20 nt, Homo sapiens
  source 1..20: mol_type = genomic RNA
caggggaggcttggctgcca

SEQ ID NO: 6845 - RNA, 20 nt, Homo sapiens
  source 1..20: mol_type = genomic RNA
aggggaggcttggctgccag

SEQ ID NO: 6846 - RNA, 20 nt, Homo sapiens
  source 1..20: mol_type = genomic RNA
ggggaggcttggctgccagc

SEQ ID NO: 6847 - RNA, 20 nt, Homo sapiens
  source 1..20: mol_type = genomic RNA
gggaggcttggctgccagct

SEQ ID NO: 6848 - RNA, 20 nt, Homo sapiens
  source 1..20: mol_type = genomic RNA
ggaggcttggctgccagctg

SEQ ID NO: 6849 - RNA, 20 nt, Homo sapiens
  source 1..20: mol_type = genomic RNA
gaggcttggctgccagctgt

SEQ ID NO: 6850 - RNA, 20 nt, Homo sapiens
  source 1..20: mol_type = genomic RNA
aggcttggctgccagctgtc

SEQ ID NO: 6851 - RNA, 20 nt, Homo sapiens
  source 1..20: mol_type = genomic RNA
ggcttggctgccagctgtct

SEQ ID NO: 6852 - RNA, 20 nt, Homo sapiens
  source 1..20: mol_type = genomic RNA
gcttggctgccagctgtctt

SEQ ID NO: 6853 - RNA, 20 nt, Homo sapiens
  source 1..20: mol_type = genomic RNA
cttggctgccagctgtcttt

SEQ ID NO: 6854 - RNA, 20 nt, Homo sapiens
  source 1..20: mol_type = genomic RNA
ttggctgccagctgtctttc

SEQ ID NO: 6855 - RNA, 20 nt, Homo sapiens
  source 1..20: mol_type = genomic RNA
tggctgccagctgtctttca

SEQ ID NO: 6856 - RNA, 20 nt, Homo sapiens
  source 1..20: mol_type = genomic RNA
ggctgccagctgtctttcag

SEQ ID NO: 6857 - RNA, 20 nt, Homo sapiens
  source 1..20: mol_type = genomic RNA
gctgccagctgtctttcaga

SEQ ID NO: 6858 - RNA, 20 nt, Homo sapiens
  source 1..20: mol_type = genomic RNA
ctgccagctgtctttcagag

SEQ ID NO: 6859 - RNA, 20 nt, Homo sapiens
  source 1..20: mol_type = genomic RNA
tgccagctgtctttcagagt

SEQ ID NO: 6860 - RNA, 20 nt, Homo sapiens
  source 1..20: mol_type = genomic RNA
gccagctgtctttcagagtt

SEQ ID NO: 6861 - RNA, 20 nt, Homo sapiens
  source 1..20: mol_type = genomic RNA
ccagctgtctttcagagttt

SEQ ID NO: 6862 - RNA, 20 nt, Homo sapiens
  source 1..20: mol_type = genomic RNA
cagctgtctttcagagtttc

SEQ ID NO: 6863 - RNA, 20 nt, Homo sapiens
  source 1..20: mol_type = genomic RNA
agctgtctttcagagtttca

SEQ ID NO: 6864 - RNA, 20 nt, Homo sapiens
  source 1..20: mol_type = genomic RNA
gctgtctttcagagtttcaa

SEQ ID NO: 6865 - RNA, 20 nt, Homo sapiens
  source 1..20: mol_type = genomic RNA
ctgtctttcagagtttcaaa

SEQ ID NO: 6866 - RNA, 20 nt, Homo sapiens
  source 1..20: mol_type = genomic RNA
tgtctttcagagtttcaaaa

SEQ ID NO: 6867 - RNA, 20 nt, Homo sapiens
  source 1..20: mol_type = genomic RNA
gtctttcagagtttcaaaaa

SEQ ID NO: 6868 - RNA, 20 nt, Homo sapiens
  source 1..20: mol_type = genomic RNA
tctttcagagtttcaaaaaa

SEQ ID NO: 6869 - RNA, 20 nt, Homo sapiens
  source 1..20: mol_type = genomic RNA
ctttcagagtttcaaaaaac

SEQ ID NO: 6870 - RNA, 20 nt, Homo sapiens
  source 1..20: mol_type = genomic RNA
tttcagagtttcaaaaaact

SEQ ID NO: 6871 - RNA, 20 nt, Homo sapiens
  source 1..20: mol_type = genomic RNA
ttcagagtttcaaaaaactt

SEQ ID NO: 6872 - RNA, 20 nt, Homo sapiens
  source 1..20: mol_type = genomic RNA
tcagagtttcaaaaaacttt

SEQ ID NO: 6873 - RNA, 20 nt, Homo sapiens
  source 1..20: mol_type = genomic RNA
cagagtttcaaaaaactttc

SEQ ID NO: 6874 - RNA, 20 nt, Homo sapiens
  source 1..20: mol_type = genomic RNA
agagtttcaaaaaactttca

SEQ ID NO: 6875 - RNA, 20 nt, Homo sapiens
  source 1..20: mol_type = genomic RNA
gagtttcaaaaaactttcaa

SEQ ID NO: 6876 - RNA, 20 nt, Homo sapiens
  source 1..20: mol_type = genomic RNA
agtttcaaaaaactttcaaa

SEQ ID NO: 6877 - RNA, 20 nt, Homo sapiens
  source 1..20: mol_type = genomic RNA
gtttcaaaaaactttcaaaa

SEQ ID NO: 6878 - RNA, 20 nt, Homo sapiens
  source 1..20: mol_type = genomic RNA
tttcaaaaaactttcaaaag

SEQ ID NO: 6879 - RNA, 20 nt, Homo sapiens
  source 1..20: mol_type = genomic RNA
ttcaaaaaactttcaaaagg

SEQ ID NO: 6880 - RNA, 20 nt, Homo sapiens
  source 1..20: mol_type = genomic RNA
tcaaaaaactttcaaaaggc

SEQ ID NO: 6881 - RNA, 20 nt, Homo sapiens
  source 1..20: mol_type = genomic RNA
caaaaaactttcaaaaggca

SEQ ID NO: 6882 - RNA, 20 nt, Homo sapiens
  source 1..20: mol_type = genomic RNA
aaaaaactttcaaaaggcaa

SEQ ID NO: 6883 - RNA, 20 nt, Homo sapiens
  source 1..20: mol_type = genomic RNA
aaaaactttcaaaaggcaaa

SEQ ID NO: 6884 - RNA, 20 nt, Homo sapiens
  source 1..20: mol_type = genomic RNA
aaaactttcaaaaggcaaaa

SEQ ID NO: 6885 - RNA, 20 nt, Homo sapiens
  source 1..20: mol_type = genomic RNA
aaactttcaaaaggcaaaag

SEQ ID NO: 6886 - RNA, 20 nt, Homo sapiens
  source 1..20: mol_type = genomic RNA
aactttcaaaaggcaaaagt

SEQ ID NO: 6887 - RNA, 20 nt, Homo sapiens
  source 1..20: mol_type = genomic RNA
actttcaaaaggcaaaagtc

SEQ ID NO: 6888 - RNA, 20 nt, Homo sapiens
  source 1..20: mol_type = genomic RNA
ctttcaaaaggcaaaagtcc

SEQ ID NO: 6889 - RNA, 20 nt, Homo sapiens
  source 1..20: mol_type = genomic RNA
tttcaaaaggcaaaagtccc

SEQ ID NO: 6890 - RNA, 20 nt, Homo sapiens
  source 1..20: mol_type = genomic RNA
ttcaaaaggcaaaagtccct

SEQ ID NO: 6891 - RNA, 20 nt, Homo sapiens
  source 1..20: mol_type = genomic RNA
tcaaaaggcaaaagtccctt

SEQ ID NO: 6892 - RNA, 20 nt, Homo sapiens
  source 1..20: mol_type = genomic RNA
caaaaggcaaaagtcccttg

SEQ ID NO: 6893 - RNA, 20 nt, Homo sapiens
  source 1..20: mol_type = genomic RNA
aaaaggcaaaagtcccttgc

SEQ ID NO: 6894 - RNA, 20 nt, Homo sapiens
  source 1..20: mol_type = genomic RNA
aaaggcaaaagtcccttgcc

SEQ ID NO: 6895 - RNA, 20 nt, Homo sapiens
  source 1..20: mol_type = genomic RNA
aaggcaaaagtcccttgcct

SEQ ID NO: 6896 - RNA, 20 nt, Homo sapiens
  source 1..20: mol_type = genomic RNA
aggcaaaagtcccttgcctt

SEQ ID NO: 6897 - RNA, 20 nt, Homo sapiens
  source 1..20: mol_type = genomic RNA
ggcaaaagtcccttgccttg

SEQ ID NO: 6898 - RNA, 20 nt, Homo sapiens
  source 1..20: mol_type = genomic RNA
gcaaaagtcccttgccttga

SEQ ID NO: 6899 - RNA, 20 nt, Homo sapiens
  source 1..20: mol_type = genomic RNA
caaaagtcccttgccttgaa

SEQ ID NO: 6900 - RNA, 20 nt, Homo sapiens
  source 1..20: mol_type = genomic RNA
aaaagtcccttgccttgaac

SEQ ID NO: 6901 - RNA, 20 nt, Homo sapiens
  source 1..20: mol_type = genomic RNA
aaagtcccttgccttgaaca

SEQ ID NO: 6902 - RNA, 20 nt, Homo sapiens
  source 1..20: mol_type = genomic RNA
aagtcccttgccttgaacaa

SEQ ID NO: 6903 - RNA, 20 nt, Homo sapiens
  source 1..20: mol_type = genomic RNA
agtcccttgccttgaacaac

SEQ ID NO: 6904 - RNA, 20 nt, Homo sapiens
  source 1..20: mol_type = genomic RNA
gtcccttgccttgaacaact

SEQ ID NO: 6905 - RNA, 20 nt, Homo sapiens
  source 1..20: mol_type = genomic RNA
tcccttgccttgaacaactg

SEQ ID NO: 6906 - RNA, 20 nt, Homo sapiens
  source 1..20: mol_type = genomic RNA
cccttgccttgaacaactgt

SEQ ID NO: 6907 - RNA, 20 nt, Homo sapiens
  source 1..20: mol_type = genomic RNA
ccttgccttgaacaactgtt

SEQ ID NO: 6908 - RNA, 20 nt, Homo sapiens
  source 1..20: mol_type = genomic RNA
cttgccttgaacaactgttg

SEQ ID NO: 6909 - RNA, 20 nt, Homo sapiens
  source 1..20: mol_type = genomic RNA
ttgccttgaacaactgttgt

SEQ ID NO: 6910 - RNA, 20 nt, Homo sapiens
  source 1..20: mol_type = genomic RNA
tgccttgaacaactgttgtt

SEQ ID NO: 6911 - RNA, 20 nt, Homo sapiens
  source 1..20: mol_type = genomic RNA
gccttgaacaactgttgttc

SEQ ID NO: 6912 - RNA, 20 nt, Homo sapiens
  source 1..20: mol_type = genomic RNA
ccttgaacaactgttgttcc

SEQ ID NO: 6913 - RNA, 20 nt, Homo sapiens
  source 1..20: mol_type = genomic RNA
cttgaacaactgttgttcct

SEQ ID NO: 6914 - RNA, 20 nt, Homo sapiens
  source 1..20: mol_type = genomic RNA
ttgaacaactgttgttcctg

SEQ ID NO: 6915 - RNA, 20 nt, Homo sapiens
  source 1..20: mol_type = genomic RNA
tgaacaactgttgttcctgg

SEQ ID NO: 6916 - RNA, 20 nt, Homo sapiens
  source 1..20: mol_type = genomic RNA
gaacaactgttgttcctgga

SEQ ID NO: 6917 - RNA, 20 nt, Homo sapiens
  source 1..20: mol_type = genomic RNA
aacaactgttgttcctggag

SEQ ID NO: 6918 - RNA, 20 nt, Homo sapiens
  source 1..20: mol_type = genomic RNA
acaactgttgttcctggaga

SEQ ID NO: 6919 - RNA, 20 nt, Homo sapiens
  source 1..20: mol_type = genomic RNA
caactgttgttcctggagac

SEQ ID NO: 6920 - RNA, 20 nt, Homo sapiens
  source 1..20: mol_type = genomic RNA
aactgttgttcctggagacg

SEQ ID NO: 6921 - RNA, 20 nt, Homo sapiens
  source 1..20: mol_type = genomic RNA
actgttgttcctggagacgc

SEQ ID NO: 6922 - RNA, 20 nt, Homo sapiens
  source 1..20: mol_type = genomic RNA
ctgttgttcctggagacgca

SEQ ID NO: 6923 - RNA, 20 nt, Homo sapiens
  source 1..20: mol_type = genomic RNA
tgttgttcctggagacgcag

SEQ ID NO: 6924 - RNA, 20 nt, Homo sapiens
  source 1..20: mol_type = genomic RNA
gttgttcctggagacgcagc

SEQ ID NO: 6925 - RNA, 20 nt, Homo sapiens
  source 1..20: mol_type = genomic RNA
ttgttcctggagacgcagcg

SEQ ID NO: 6926 - RNA, 20 nt, Homo sapiens
  source 1..20: mol_type = genomic RNA
tgttcctggagacgcagcga

SEQ ID NO: 6927 - RNA, 20 nt, Homo sapiens
  source 1..20: mol_type = genomic RNA
gttcctggagacgcagcgaa

SEQ ID NO: 6928 - RNA, 20 nt, Homo sapiens
  source 1..20: mol_type = genomic RNA
ttcctggagacgcagcgaag

SEQ ID NO: 6929 - RNA, 20 nt, Homo sapiens
  source 1..20: mol_type = genomic RNA
tcctggagacgcagcgaagc

SEQ ID NO: 6930 - RNA, 20 nt, Homo sapiens
  source 1..20: mol_type = genomic RNA
cctggagacgcagcgaagcc

SEQ ID NO: 6931 - RNA, 20 nt, Homo sapiens
  source 1..20: mol_type = genomic RNA
ctggagacgcagcgaagccc

SEQ ID NO: 6932 - RNA, 20 nt, Homo sapiens
  source 1..20: mol_type = genomic RNA
tggagacgcagcgaagccct

SEQ ID NO: 6933 - RNA, 20 nt, Homo sapiens
  source 1..20: mol_type = genomic RNA
ggagacgcagcgaagccctc

SEQ ID NO: 6934 - RNA, 20 nt, Homo sapiens
  source 1..20: mol_type = genomic RNA
gagacgcagcgaagccctcg

SEQ ID NO: 6935 - RNA, 20 nt, Homo sapiens
  source 1..20: mol_type = genomic RNA
agacgcagcgaagccctcga

SEQ ID NO: 6936 - RNA, 20 nt, Homo sapiens
  source 1..20: mol_type = genomic RNA
gacgcagcgaagccctcgat

SEQ ID NO: 6937 - RNA, 20 nt, Homo sapiens
  source 1..20: mol_type = genomic RNA
acgcagcgaagccctcgatg

SEQ ID NO: 6938 - RNA, 20 nt, Homo sapiens
  source 1..20: mol_type = genomic RNA
cgcagcgaagccctcgatgg

SEQ ID NO: 6939 - RNA, 20 nt, Homo sapiens
  source 1..20: mol_type = genomic RNA
gcagcgaagccctcgatggt

SEQ ID NO: 6940 - RNA, 20 nt, Homo sapiens
  source 1..20: mol_type = genomic RNA
cagcgaagccctcgatggtg

SEQ ID NO: 6941 - RNA, 20 nt, Homo sapiens
  source 1..20: mol_type = genomic RNA
agcgaagccctcgatggtgc

SEQ ID NO: 6942 - RNA, 20 nt, Homo sapiens
  source 1..20: mol_type = genomic RNA
gcgaagccctcgatggtgcg

SEQ ID NO: 6943 - RNA, 20 nt, Homo sapiens
  source 1..20: mol_type = genomic RNA
cgaagccctcgatggtgcgc

SEQ ID NO: 6944 - RNA, 20 nt, Homo sapiens
  source 1..20: mol_type = genomic RNA
gaagccctcgatggtgcgca

SEQ ID NO: 6945 - RNA, 20 nt, Homo sapiens
  source 1..20: mol_type = genomic RNA
aagccctcgatggtgcgcat

SEQ ID NO: 6946 - RNA, 20 nt, Homo sapiens
  source 1..20: mol_type = genomic RNA
agccctcgatggtgcgcatg

SEQ ID NO: 6947 - RNA, 20 nt, Homo sapiens
  source 1..20: mol_type = genomic RNA
gccctcgatggtgcgcatgg

SEQ ID NO: 6948 - RNA, 20 nt, Homo sapiens
  source 1..20: mol_type = genomic RNA
ccctcgatggtgcgcatggc

SEQ ID NO: 6949 - RNA, 20 nt, Homo sapiens
  source 1..20: mol_type = genomic RNA
cctcgatggtgcgcatggca

SEQ ID NO: 6950 - RNA, 20 nt, Homo sapiens
  source 1..20: mol_type = genomic RNA
ctcgatggtgcgcatggcat

SEQ ID NO: 6951 - RNA, 20 nt, Homo sapiens
  source 1..20: mol_type = genomic RNA
tcgatggtgcgcatggcatt

SEQ ID NO: 6952 - RNA, 20 nt, Homo sapiens
  source 1..20: mol_type = genomic RNA
cgatggtgcgcatggcattt

SEQ ID NO: 6953 - RNA, 20 nt, Homo sapiens
  source 1..20: mol_type = genomic RNA
gatggtgcgcatggcatttc

SEQ ID NO: 6954 - RNA, 20 nt, Homo sapiens
  source 1..20: mol_type = genomic RNA
atggtgcgcatggcatttcc

SEQ ID NO: 6955 - RNA, 20 nt, Homo sapiens
  source 1..20: mol_type = genomic RNA
tggtgcgcatggcatttcct

SEQ ID NO: 6956 - RNA, 20 nt, Homo sapiens
  source 1..20: mol_type = genomic RNA
ggtgcgcatggcatttcctg

SEQ ID NO: 6957 - RNA, 20 nt, Homo sapiens
  source 1..20: mol_type = genomic RNA
gtgcgcatggcatttcctgc

SEQ ID NO: 6958 - RNA, 20 nt, Homo sapiens
  source 1..20: mol_type = genomic RNA
tgcgcatggcatttcctgca

SEQ ID NO: 6959 - RNA, 20 nt, Homo sapiens
  source 1..20: mol_type = genomic RNA
gcgcatggcatttcctgcag

SEQ ID NO: 6960 - RNA, 20 nt, Homo sapiens
  source 1..20: mol_type = genomic RNA
cgcatggcatttcctgcagc

SEQ ID NO: 6961 - RNA, 20 nt, Homo sapiens
  source 1..20: mol_type = genomic RNA
gcatggcatttcctgcagcc

SEQ ID NO: 6962 - RNA, 20 nt, Homo sapiens
  source 1..20: mol_type = genomic RNA
catggcatttcctgcagcct

SEQ ID NO: 6963 - RNA, 20 nt, Homo sapiens
  source 1..20: mol_type = genomic RNA
atggcatttcctgcagcctc

SEQ ID NO: 6964 - RNA, 20 nt, Homo sapiens
  source 1..20: mol_type = genomic RNA
tggcatttcctgcagcctcc

SEQ ID NO: 6965 - RNA, 20 nt, Homo sapiens
  source 1..20: mol_type = genomic RNA
ggcatttcctgcagcctccc

SEQ ID NO: 6966 - RNA, 20 nt, Homo sapiens
  source 1..20: mol_type = genomic RNA
gcatttcctgcagcctcccc

SEQ ID NO: 6967 - RNA, 20 nt, Homo sapiens
  source 1..20: mol_type = genomic RNA
catttcctgcagcctcccct

SEQ ID NO: 6968 - RNA, 20 nt, Homo sapiens
  source 1..20: mol_type = genomic RNA
atttcctgcagcctcccctt

SEQ ID NO: 6969 - RNA, 20 nt, Homo sapiens
  source 1..20: mol_type = genomic RNA
tttcctgcagcctccccttg

SEQ ID NO: 6970 - RNA, 20 nt, Homo sapiens
  source 1..20: mol_type = genomic RNA
ttcctgcagcctccccttgg

SEQ ID NO: 6971 - RNA, 20 nt, Homo sapiens
  source 1..20: mol_type = genomic RNA
tcctgcagcctccccttggc

SEQ ID NO: 6972 - RNA, 20 nt, Homo sapiens
  source 1..20: mol_type = genomic RNA
cctgcagcctccccttggca

SEQ ID NO: 6973 - RNA, 20 nt, Homo sapiens
  source 1..20: mol_type = genomic RNA
ctgcagcctccccttggcat

SEQ ID NO: 6974 - RNA, 20 nt, Homo sapiens
  source 1..20: mol_type = genomic RNA
tgcagcctccccttggcatg

SEQ ID NO: 6975 - RNA, 20 nt, Homo sapiens
  source 1..20: mol_type = genomic RNA
gcagcctccccttggcatgg

SEQ ID NO: 6976 - RNA, 20 nt, Homo sapiens
  source 1..20: mol_type = genomic RNA
cagcctccccttggcatggg

SEQ ID NO: 6977 - RNA, 20 nt, Homo sapiens
  source 1..20: mol_type = genomic RNA
agcctccccttggcatggga

SEQ ID NO: 6978 - RNA, 20 nt, Homo sapiens
  source 1..20: mol_type = genomic RNA
gcctccccttggcatgggat

SEQ ID NO: 6979 - RNA, 20 nt, Homo sapiens
  source 1..20: mol_type = genomic RNA
cctccccttggcatgggatg

SEQ ID NO: 6980 - RNA, 20 nt, Homo sapiens
  source 1..20: mol_type = genomic RNA
ctccccttggcatgggatgg

SEQ ID NO: 6981 - RNA, 20 nt, Homo sapiens
  source 1..20: mol_type = genomic RNA
tccccttggcatgggatggc

SEQ ID NO: 6982 - RNA, 20 nt, Homo sapiens
  source 1..20: mol_type = genomic RNA
ccccttggcatgggatggca

SEQ ID NO: 6983 - RNA, 20 nt, Homo sapiens
  source 1..20: mol_type = genomic RNA
cccttggcatgggatggcat

SEQ ID NO: 6984 - RNA, 20 nt, Homo sapiens
  source 1..20: mol_type = genomic RNA
ccttggcatgggatggcatc

SEQ ID NO: 6985 - RNA, 20 nt, Homo sapiens
  source 1..20: mol_type = genomic RNA
cttggcatgggatggcatcc

SEQ ID NO: 6986 - RNA, 20 nt, Homo sapiens
  source 1..20: mol_type = genomic RNA
ttggcatgggatggcatcct

SEQ ID NO: 6987 - RNA, 20 nt, Homo sapiens
  source 1..20: mol_type = genomic RNA
tggcatgggatggcatcctg

SEQ ID NO: 6988 - RNA, 20 nt, Homo sapiens
  source 1..20: mol_type = genomic RNA
ggcatgggatggcatcctgg

SEQ ID NO: 6989 - RNA, 20 nt, Homo sapiens
  source 1..20: mol_type = genomic RNA
gcatgggatggcatcctggt

SEQ ID NO: 6990 - RNA, 20 nt, Homo sapiens
  source 1..20: mol_type = genomic RNA
catgggatggcatcctggtg

SEQ ID NO: 6991 - RNA, 20 nt, Homo sapiens
  source 1..20: mol_type = genomic RNA
atgggatggcatcctggtgt

SEQ ID NO: 6992 - RNA, 20 nt, Homo sapiens
  source 1..20: mol_type = genomic RNA
tgggatggcatcctggtgtg

SEQ ID NO: 6993 - RNA, 20 nt, Homo sapiens
  source 1..20: mol_type = genomic RNA
gggatggcatcctggtgtgc

SEQ ID NO: 6994 - RNA, 20 nt, Homo sapiens
  source 1..20: mol_type = genomic RNA
ggatggcatcctggtgtgca

SEQ ID NO: 6995 - RNA, 20 nt, Homo sapiens
  source 1..20: mol_type = genomic RNA
gatggcatcctggtgtgcac

SEQ ID NO: 6996 - RNA, 20 nt, Homo sapiens
  source 1..20: mol_type = genomic RNA
atggcatcctggtgtgcact

SEQ ID NO: 6997 - RNA, 20 nt, Homo sapiens
  source 1..20: mol_type = genomic RNA
tggcatcctggtgtgcactt

SEQ ID NO: 6998 - RNA, 20 nt, Homo sapiens
  source 1..20: mol_type = genomic RNA
ggcatcctggtgtgcacttt

SEQ ID NO: 6999 - RNA, 20 nt, Homo sapiens
  source 1..20: mol_type = genomic RNA
gcatcctggtgtgcactttg

SEQ ID NO: 7000 - RNA, 20 nt, Homo sapiens
  source 1..20: mol_type = genomic RNA
catcctggtgtgcactttgt

SEQ ID NO: 7001 - RNA, 20 nt, Homo sapiens
  source 1..20: mol_type = genomic RNA
atcctggtgtgcactttgtc

SEQ ID NO: 7002 - RNA, 20 nt, Homo sapiens
  source 1..20: mol_type = genomic RNA
tcctggtgtgcactttgtca

SEQ ID NO: 7003 - RNA, 20 nt, Homo sapiens
  source 1..20: mol_type = genomic RNA
cctggtgtgcactttgtcac

SEQ ID NO: 7004 - RNA, 20 nt, Homo sapiens
  source 1..20: mol_type = genomic RNA
ctggtgtgcactttgtcaca

SEQ ID NO: 7005 - RNA, 20 nt, Homo sapiens
  source 1..20: mol_type = genomic RNA
tggtgtgcactttgtcacac

SEQ ID NO: 7006 - RNA, 20 nt, Homo sapiens
  source 1..20: mol_type = genomic RNA
ggtgtgcactttgtcacact

SEQ ID NO: 7007 - RNA, 20 nt, Homo sapiens
  source 1..20: mol_type = genomic RNA
gtgtgcactttgtcacactg

SEQ ID NO: 7008 - RNA, 20 nt, Homo sapiens
  source 1..20: mol_type = genomic RNA
tgtgcactttgtcacactgc

SEQ ID NO: 7009 - RNA, 20 nt, Homo sapiens
  source 1..20: mol_type = genomic RNA
gtgcactttgtcacactgcg

SEQ ID NO: 7010 - RNA, 20 nt, Homo sapiens
  source 1..20: mol_type = genomic RNA
tgcactttgtcacactgcga

SEQ ID NO: 7011 - RNA, 20 nt, Homo sapiens
  source 1..20: mol_type = genomic RNA
gcactttgtcacactgcgat

SEQ ID NO: 7012 - RNA, 20 nt, Homo sapiens
  source 1..20: mol_type = genomic RNA
cactttgtcacactgcgatg

SEQ ID NO: 7013 - RNA, 20 nt, Homo sapiens
  source 1..20: mol_type = genomic RNA
actttgtcacactgcgatgg

SEQ ID NO: 7014 - RNA, 20 nt, Homo sapiens
  source 1..20: mol_type = genomic RNA
ctttgtcacactgcgatggg

SEQ ID NO: 7015 - RNA, 20 nt, Homo sapiens
  source 1..20: mol_type = genomic RNA
tttgtcacactgcgatggga

SEQ ID NO: 7016 - RNA, 20 nt, Homo sapiens
  source 1..20: mol_type = genomic RNA
ttgtcacactgcgatgggat

SEQ ID NO: 7017 - RNA, 20 nt, Homo sapiens
  source 1..20: mol_type = genomic RNA
tgtcacactgcgatgggatt

SEQ ID NO: 7018 - RNA, 20 nt, Homo sapiens
  source 1..20: mol_type = genomic RNA
gtcacactgcgatgggattt

SEQ ID NO: 7019 - RNA, 20 nt, Homo sapiens
  source 1..20: mol_type = genomic RNA
tcacactgcgatgggatttt

SEQ ID NO: 7020 - RNA, 20 nt, Homo sapiens
  source 1..20: mol_type = genomic RNA
cacactgcgatgggattttc

SEQ ID NO: 7021 - RNA, 20 nt, Homo sapiens
  source 1..20: mol_type = genomic RNA
acactgcgatgggattttcc

SEQ ID NO: 7022 - RNA, 20 nt, Homo sapiens
  source 1..20: mol_type = genomic RNA
cactgcgatgggattttccc

SEQ ID NO: 7023 - RNA, 20 nt, Homo sapiens
  source 1..20: mol_type = genomic RNA
actgcgatgggattttccca

SEQ ID NO: 7024 - RNA, 20 nt, Homo sapiens
  source 1..20: mol_type = genomic RNA
ctgcgatgggattttcccaa

SEQ ID NO: 7025 - RNA, 20 nt, Homo sapiens
  source 1..20: mol_type = genomic RNA
tgcgatgggattttcccaac

SEQ ID NO: 7026 - RNA, 20 nt, Homo sapiens
  source 1..20: mol_type = genomic RNA
gcgatgggattttcccaaca

SEQ ID NO: 7027 - RNA, 20 nt, Homo sapiens
  source 1..20: mol_type = genomic RNA
cgatgggattttcccaacat

SEQ ID NO: 7028 - RNA, 20 nt, Homo sapiens
  source 1..20: mol_type = genomic RNA
gatgggattttcccaacatg

SEQ ID NO: 7029 - RNA, 20 nt, Homo sapiens
  source 1..20: mol_type = genomic RNA
atgggattttcccaacatgc

SEQ ID NO: 7030 - RNA, 20 nt, Homo sapiens
  source 1..20: mol_type = genomic RNA
tgggattttcccaacatgca

SEQ ID NO: 7031 - RNA, 20 nt, Homo sapiens
  source 1..20: mol_type = genomic RNA
gggattttcccaacatgcac

SEQ ID NO: 7032 - RNA, 20 nt, Homo sapiens
  source 1..20: mol_type = genomic RNA
ggattttcccaacatgcaca

SEQ ID NO: 7033 - RNA, 20 nt, Homo sapiens
  source 1..20: mol_type = genomic RNA
gattttcccaacatgcacag

SEQ ID NO: 7034 - RNA, 20 nt, Homo sapiens
  source 1..20: mol_type = genomic RNA
attttcccaacatgcacaga

SEQ ID NO: 7035 - RNA, 20 nt, Homo sapiens
  source 1..20: mol_type = genomic RNA
ttttcccaacatgcacagaa

SEQ ID NO: 7036 - RNA, 20 nt, Homo sapiens
  source 1..20: mol_type = genomic RNA
tttcccaacatgcacagaag

SEQ ID NO: 7037 - RNA, 20 nt, Homo sapiens
  source 1..20: mol_type = genomic RNA
ttcccaacatgcacagaagc

SEQ ID NO: 7038 - RNA, 20 nt, Homo sapiens
  source 1..20: mol_type = genomic RNA
tcccaacatgcacagaagca

SEQ ID NO: 7039 - RNA, 20 nt, Homo sapiens
  source 1..20: mol_type = genomic RNA
cccaacatgcacagaagcag

SEQ ID NO: 7040 - RNA, 20 nt, Homo sapiens
  source 1..20: mol_type = genomic RNA
ccaacatgcacagaagcaga

SEQ ID NO: 7041 - RNA, 20 nt, Homo sapiens
  source 1..20: mol_type = genomic RNA
caacatgcacagaagcagag

SEQ ID NO: 7042 - RNA, 20 nt, Homo sapiens
  source 1..20: mol_type = genomic RNA
aacatgcacagaagcagaga

SEQ ID NO: 7043 - RNA, 20 nt, Homo sapiens
  source 1..20: mol_type = genomic RNA
acatgcacagaagcagagag

SEQ ID NO: 7044 - RNA, 20 nt, Homo sapiens
  source 1..20: mol_type = genomic RNA
catgcacagaagcagagaga

SEQ ID NO: 7045 - RNA, 20 nt, Homo sapiens
  source 1..20: mol_type = genomic RNA
atgcacagaagcagagagac

SEQ ID NO: 7046 - RNA, 20 nt, Homo sapiens
  source 1..20: mol_type = genomic RNA
tgcacagaagcagagagacg

SEQ ID NO: 7047 - RNA, 20 nt, Homo sapiens
  source 1..20: mol_type = genomic RNA
gcacagaagcagagagacga

SEQ ID NO: 7048 - RNA, 20 nt, Homo sapiens
  source 1..20: mol_type = genomic RNA
cacagaagcagagagacgag

SEQ ID NO: 7049 - RNA, 20 nt, Homo sapiens
  source 1..20: mol_type = genomic RNA
acagaagcagagagacgagt

SEQ ID NO: 7050 - RNA, 20 nt, Homo sapiens
  source 1..20: mol_type = genomic RNA
cagaagcagagagacgagtg

SEQ ID NO: 7051 - RNA, 20 nt, Homo sapiens
  source 1..20: mol_type = genomic RNA
agaagcagagagacgagtgc

SEQ ID NO: 7052 - RNA, 20 nt, Homo sapiens
  source 1..20: mol_type = genomic RNA
gaagcagagagacgagtgct

SEQ ID NO: 7053 - RNA, 20 nt, Homo sapiens
  source 1..20: mol_type = genomic RNA
aagcagagagacgagtgcta

SEQ ID NO: 7054 - RNA, 20 nt, Homo sapiens
  source 1..20: mol_type = genomic RNA
agcagagagacgagtgctag

SEQ ID NO: 7055 - RNA, 20 nt, Homo sapiens
  source 1..20: mol_type = genomic RNA
gcagagagacgagtgctaga

SEQ ID NO: 7056 - RNA, 20 nt, Homo sapiens
  source 1..20: mol_type = genomic RNA
cagagagacgagtgctagac

SEQ ID NO: 7057 - RNA, 20 nt, Homo sapiens
  source 1..20: mol_type = genomic RNA
agagagacgagtgctagacc

SEQ ID NO: 7058 - RNA, 20 nt, Homo sapiens
  source 1..20: mol_type = genomic RNA
gagagacgagtgctagaccc

SEQ ID NO: 7059 - RNA, 20 nt, Homo sapiens
  source 1..20: mol_type = genomic RNA
agagacgagtgctagacccc

SEQ ID NO: 7060 - RNA, 20 nt, Homo sapiens
  source 1..20: mol_type = genomic RNA
gagacgagtgctagaccccc

SEQ ID NO: 7061 - RNA, 20 nt, Homo sapiens
  source 1..20: mol_type = genomic RNA
agacgagtgctagacccccg

SEQ ID NO: 7062 - RNA, 20 nt, Homo sapiens
  source 1..20: mol_type = genomic RNA
gacgagtgctagacccccgc

SEQ ID NO: 7063 - RNA, 20 nt, Homo sapiens
  source 1..20: mol_type = genomic RNA
acgagtgctagacccccgcg

SEQ ID NO: 7064 - RNA, 20 nt, Homo sapiens
  source 1..20: mol_type = genomic RNA
cgagtgctagacccccgcgc

SEQ ID NO: 7065 - RNA, 20 nt, Homo sapiens
  source 1..20: mol_type = genomic RNA
gagtgctagacccccgcgct

SEQ ID NO: 7066 - RNA, 20 nt, Homo sapiens
  source 1..20: mol_type = genomic RNA
agtgctagacccccgcgctc

SEQ ID NO: 7067 - RNA, 20 nt, Homo sapiens
  source 1..20: mol_type = genomic RNA
gtgctagacccccgcgctcc

SEQ ID NO: 7068 - RNA, 20 nt, Homo sapiens
  source 1..20: mol_type = genomic RNA
tgctagacccccgcgctccc

SEQ ID NO: 7069 - RNA, 20 nt, Homo sapiens
  source 1..20: mol_type = genomic RNA
gctagacccccgcgctcccc

SEQ ID NO: 7070 - RNA, 20 nt, Homo sapiens
  source 1..20: mol_type = genomic RNA
ctagacccccgcgctcccca

SEQ ID NO: 7071 - RNA, 20 nt, Homo sapiens
  source 1..20: mol_type = genomic RNA
tagacccccgcgctccccag

SEQ ID NO: 7072 - RNA, 20 nt, Homo sapiens
  source 1..20: mol_type = genomic RNA
agacccccgcgctccccagt

SEQ ID NO: 7073 - RNA, 20 nt, Homo sapiens
  source 1..20: mol_type = genomic RNA
gacccccgcgctccccagtg

SEQ ID NO: 7074 - RNA, 20 nt, Homo sapiens
  source 1..20: mol_type = genomic RNA
acccccgcgctccccagtgc

SEQ ID NO: 7075 - RNA, 20 nt, Homo sapiens
  source 1..20: mol_type = genomic RNA
cccccgcgctccccagtgcc

SEQ ID NO: 7076 - RNA, 20 nt, Homo sapiens
  source 1..20: mol_type = genomic RNA
ccccgcgctccccagtgccc

SEQ ID NO: 7077 - RNA, 20 nt, Homo sapiens
  source 1..20: mol_type = genomic RNA
cccgcgctccccagtgccca

SEQ ID NO: 7078 - RNA, 20 nt, Homo sapiens
  source 1..20: mol_type = genomic RNA
ccgcgctccccagtgcccag

SEQ ID NO: 7079 - RNA, 20 nt, Homo sapiens
  source 1..20: mol_type = genomic RNA
cgcgctccccagtgcccagc

SEQ ID NO: 7080 - RNA, 20 nt, Homo sapiens
  source 1..20: mol_type = genomic RNA
gcgctccccagtgcccagcc

SEQ ID NO: 7081 - RNA, 20 nt, Homo sapiens
  source 1..20: mol_type = genomic RNA
cgctccccagtgcccagccc

SEQ ID NO: 7082 - RNA, 20 nt, Homo sapiens
  source 1..20: mol_type = genomic RNA
gctccccagtgcccagcccc

SEQ ID NO: 7083 - RNA, 20 nt, Homo sapiens
  source 1..20: mol_type = genomic RNA
ctccccagtgcccagccccg

SEQ ID NO: 7084 - RNA, 20 nt, Homo sapiens
  source 1..20: mol_type = genomic RNA
tccccagtgcccagccccga

SEQ ID NO: 7085 - RNA, 20 nt, Homo sapiens
  source 1..20: mol_type = genomic RNA
ccccagtgcccagccccgac

SEQ ID NO: 7086 - RNA, 20 nt, Homo sapiens
  source 1..20: mol_type = genomic RNA
cccagtgcccagccccgacc

SEQ ID NO: 7087 - RNA, 20 nt, Homo sapiens
  source 1..20: mol_type = genomic RNA
ccagtgcccagccccgacca

SEQ ID NO: 7088 - RNA, 20 nt, Homo sapiens
  source 1..20: mol_type = genomic RNA
cagtgcccagccccgaccag

SEQ ID NO: 7089 - RNA, 20 nt, Homo sapiens
  source 1..20: mol_type = genomic RNA
agtgcccagccccgaccagg

SEQ ID NO: 7090 - RNA, 20 nt, Homo sapiens
  source 1..20: mol_type = genomic RNA
gtgcccagccccgaccaggg

SEQ ID NO: 7091 - RNA, 20 nt, Homo sapiens
  source 1..20: mol_type = genomic RNA
tgcccagccccgaccagggt

SEQ ID NO: 7092 - RNA, 20 nt, Homo sapiens
  source 1..20: mol_type = genomic RNA
gcccagccccgaccagggtg

SEQ ID NO: 7093 - RNA, 20 nt, Homo sapiens
  source 1..20: mol_type = genomic RNA
cccagccccgaccagggtgt

SEQ ID NO: 7094 - RNA, 20 nt, Homo sapiens
  source 1..20: mol_type = genomic RNA
ccagccccgaccagggtgtc

SEQ ID NO: 7095 - RNA, 20 nt, Homo sapiens
  source 1..20: mol_type = genomic RNA
cagccccgaccagggtgtcc

SEQ ID NO: 7096 - RNA, 20 nt, Homo sapiens
  source 1..20: mol_type = genomic RNA
agccccgaccagggtgtcca

SEQ ID NO: 7097 - RNA, 20 nt, Homo sapiens
  source 1..20: mol_type = genomic RNA
gccccgaccagggtgtccag

SEQ ID NO: 7098 - RNA, 20 nt, Homo sapiens
  source 1..20: mol_type = genomic RNA
ccccgaccagggtgtccagg

SEQ ID NO: 7099 - RNA, 20 nt, Homo sapiens
  source 1..20: mol_type = genomic RNA
cccgaccagggtgtccaggg

SEQ ID NO: 7100 - RNA, 20 nt, Homo sapiens
  source 1..20: mol_type = genomic RNA
ccgaccagggtgtccagggc

SEQ ID NO: 7101 - RNA, 20 nt, Homo sapiens
  source 1..20: mol_type = genomic RNA
cgaccagggtgtccagggcg

SEQ ID NO: 7102 - RNA, 20 nt, Homo sapiens
  source 1..20: mol_type = genomic RNA
gaccagggtgtccagggcgg

SEQ ID NO: 7103 - RNA, 20 nt, Homo sapiens
  source 1..20: mol_type = genomic RNA
accagggtgtccagggcggg

SEQ ID NO: 7104 - RNA, 20 nt, Homo sapiens
  source 1..20: mol_type = genomic RNA
ccagggtgtccagggcgggt

SEQ ID NO: 7105 - RNA, 20 nt, Homo sapiens
  source 1..20: mol_type = genomic RNA
cagggtgtccagggcgggtc

SEQ ID NO: 7106 - RNA, 20 nt, Homo sapiens
  source 1..20: mol_type = genomic RNA
agggtgtccagggcgggtcc

SEQ ID NO: 7107 - RNA, 20 nt, Homo sapiens
  source 1..20: mol_type = genomic RNA
gggtgtccagggcgggtcca

SEQ ID NO: 7108 - RNA, 20 nt, Homo sapiens
  source 1..20: mol_type = genomic RNA
ggtgtccagggcgggtccag

SEQ ID NO: 7109 - RNA, 20 nt, Homo sapiens
  source 1..20: mol_type = genomic RNA
gtgtccagggcgggtccagg

SEQ ID NO: 7110 - RNA, 20 nt, Homo sapiens
  source 1..20: mol_type = genomic RNA
tgtccagggcgggtccaggc

SEQ ID NO: 7111 - RNA, 20 nt, Homo sapiens
  source 1..20: mol_type = genomic RNA
gtccagggcgggtccaggca

SEQ ID NO: 7112 - RNA, 20 nt, Homo sapiens
  source 1..20: mol_type = genomic RNA
tccagggcgggtccaggcac

SEQ ID NO: 7113 - RNA, 20 nt, Homo sapiens
  source 1..20: mol_type = genomic RNA
ccagggcgggtccaggcacc

SEQ ID NO: 7114 - RNA, 20 nt, Homo sapiens
  source 1..20: mol_type = genomic RNA
cagggcgggtccaggcaccg

SEQ ID NO: 7115 - RNA, 20 nt, Homo sapiens
  source 1..20: mol_type = genomic RNA
agggcgggtccaggcaccgg

SEQ ID NO: 7116 - RNA, 20 nt, Homo sapiens
  source 1..20: mol_type = genomic RNA
gggcgggtccaggcaccggc

SEQ ID NO: 7117 - RNA, 20 nt, Homo sapiens
  source 1..20: mol_type = genomic RNA
ggcgggtccaggcaccggcg

SEQ ID NO: 7118 - RNA, 20 nt, Homo sapiens
  source 1..20: mol_type = genomic RNA
gcgggtccaggcaccggcgc

SEQ ID NO: 7119 - RNA, 20 nt, Homo sapiens
  source 1..20: mol_type = genomic RNA
cgggtccaggcaccggcgcc

SEQ ID NO: 7120 - RNA, 20 nt, Homo sapiens
  source 1..20: mol_type = genomic RNA
gggtccaggcaccggcgccc

SEQ ID NO: 7121 - RNA, 20 nt, Homo sapiens
  source 1..20: mol_type = genomic RNA
ggtccaggcaccggcgccca

SEQ ID NO: 7122 - RNA, 20 nt, Homo sapiens
  source 1..20: mol_type = genomic RNA
gtccaggcaccggcgcccag

SEQ ID NO: 7123 - RNA, 20 nt, Homo sapiens
  source 1..20: mol_type = genomic RNA
tccaggcaccggcgcccagc

SEQ ID NO: 7124 - RNA, 20 nt, Homo sapiens
  source 1..20: mol_type = genomic RNA
ccaggcaccggcgcccagcc

SEQ ID NO: 7125 - RNA, 20 nt, Homo sapiens
  source 1..20: mol_type = genomic RNA
caggcaccggcgcccagccc

SEQ ID NO: 7126 - RNA, 20 nt, Homo sapiens
  source 1..20: mol_type = genomic RNA
aggcaccggcgcccagcccc

SEQ ID NO: 7127 - RNA, 20 nt, Homo sapiens
  source 1..20: mol_type = genomic RNA
ggcaccggcgcccagccccc

SEQ ID NO: 7128 - RNA, 20 nt, Homo sapiens
  source 1..20: mol_type = genomic RNA
gcaccggcgcccagccccca

SEQ ID NO: 7129 - RNA, 20 nt, Homo sapiens
  source 1..20: mol_type = genomic RNA
caccggcgcccagcccccat

SEQ ID NO: 7130 - RNA, 20 nt, Homo sapiens
  source 1..20: mol_type = genomic RNA
accggcgcccagcccccatg

SEQ ID NO: 7131 - RNA, 20 nt, Homo sapiens
  source 1..20: mol_type = genomic RNA
ccggcgcccagcccccatgg

SEQ ID NO: 7132 - RNA, 20 nt, Homo sapiens
  source 1..20: mol_type = genomic RNA
cggcgcccagcccccatggg

SEQ ID NO: 7133 - RNA, 20 nt, Homo sapiens
  source 1..20: mol_type = genomic RNA
ggcgcccagcccccatgggg

SEQ ID NO: 7134 - RNA, 20 nt, Homo sapiens
  source 1..20: mol_type = genomic RNA
gcgcccagcccccatggggt

SEQ ID NO: 7135 - RNA, 20 nt, Homo sapiens
  source 1..20: mol_type = genomic RNA
cgcccagcccccatggggtg

SEQ ID NO: 7136 - RNA, 20 nt, Homo sapiens
  source 1..20: mol_type = genomic RNA
gcccagcccccatggggtgt

SEQ ID NO: 7137 - RNA, 20 nt, Homo sapiens
  source 1..20: mol_type = genomic RNA
cccagcccccatggggtgtc

SEQ ID NO: 7138 - RNA, 20 nt, Homo sapiens
  source 1..20: mol_type = genomic RNA
ccagcccccatggggtgtcc

SEQ ID NO: 7139 - RNA, 20 nt, Homo sapiens
  source 1..20: mol_type = genomic RNA
cagcccccatggggtgtccg

SEQ ID NO: 7140 - RNA, 20 nt, Homo sapiens
  source 1..20: mol_type = genomic RNA
agcccccatggggtgtccgg

SEQ ID NO: 7141 - RNA, 20 nt, Homo sapiens
  source 1..20: mol_type = genomic RNA
gcccccatggggtgtccgga

SEQ ID NO: 7142 - RNA, 20 nt, Homo sapiens
  source 1..20: mol_type = genomic RNA
cccccatggggtgtccggag

SEQ ID NO: 7143 - RNA, 20 nt, Homo sapiens
  source 1..20: mol_type = genomic RNA
ccccatggggtgtccggagt

SEQ ID NO: 7144 - RNA, 20 nt, Homo sapiens
  source 1..20: mol_type = genomic RNA
cccatggggtgtccggagtg

SEQ ID NO: 7145 - RNA, 20 nt, Homo sapiens
  source 1..20: mol_type = genomic RNA
ccatggggtgtccggagtgg

SEQ ID NO: 7146 - RNA, 20 nt, Homo sapiens
  source 1..20: mol_type = genomic RNA
catggggtgtccggagtggg

SEQ ID NO: 7147 - RNA, 20 nt, Homo sapiens
  source 1..20: mol_type = genomic RNA
atggggtgtccggagtgggt

SEQ ID NO: 7148 - RNA, 20 nt, Homo sapiens
  source 1..20: mol_type = genomic RNA
tggggtgtccggagtgggtc

SEQ ID NO: 7149 - RNA, 20 nt, Homo sapiens
  source 1..20: mol_type = genomic RNA
ggggtgtccggagtgggtcc

SEQ ID NO: 7150 - RNA, 20 nt, Homo sapiens
  source 1..20: mol_type = genomic RNA
gggtgtccggagtgggtcca

SEQ ID NO: 7151 - RNA, 20 nt, Homo sapiens
  source 1..20: mol_type = genomic RNA
ggtgtccggagtgggtccag

SEQ ID NO: 7152 - RNA, 20 nt, Homo sapiens
  source 1..20: mol_type = genomic RNA
gtgtccggagtgggtccagg

SEQ ID NO: 7153 - RNA, 20 nt, Homo sapiens
  source 1..20: mol_type = genomic RNA
tgtccggagtgggtccaggc

SEQ ID NO: 7154 - RNA, 20 nt, Homo sapiens
  source 1..20: mol_type = genomic RNA
gtccggagtgggtccaggca

SEQ ID NO: 7155 - RNA, 20 nt, Homo sapiens
  source 1..20: mol_type = genomic RNA
tccggagtgggtccaggcac

SEQ ID NO: 7156 - RNA, 20 nt, Homo sapiens
  source 1..20: mol_type = genomic RNA
ccggagtgggtccaggcacc

SEQ ID NO: 7157 - RNA, 20 nt, Homo sapiens
  source 1..20: mol_type = genomic RNA
cggagtgggtccaggcaccg

SEQ ID NO: 7158 - RNA, 20 nt, Homo sapiens
  source 1..20: mol_type = genomic RNA
ggagtgggtccaggcaccgg

SEQ ID NO: 7159 - RNA, 20 nt, Homo sapiens
  source 1..20: mol_type = genomic RNA
gagtgggtccaggcaccggc

SEQ ID NO: 7160 - RNA, 20 nt, Homo sapiens
  source 1..20: mol_type = genomic RNA
agtgggtccaggcaccggcg

SEQ ID NO: 7161 - RNA, 20 nt, Homo sapiens
  source 1..20: mol_type = genomic RNA
gtgggtccaggcaccggcgc

SEQ ID NO: 7162 - RNA, 20 nt, Homo sapiens
  source 1..20: mol_type = genomic RNA
tgggtccaggcaccggcgcc

SEQ ID NO: 7163 - RNA, 20 nt, Homo sapiens
  source 1..20: mol_type = genomic RNA
gggtccaggcaccggcgccc

SEQ ID NO: 7164 - RNA, 20 nt, Homo sapiens
  source 1..20: mol_type = genomic RNA
ggtccaggcaccggcgccca

SEQ ID NO: 7165 - RNA, 20 nt, Homo sapiens
  source 1..20: mol_type = genomic RNA
gtccaggcaccggcgcccag

SEQ ID NO: 7166 - RNA, 20 nt, Homo sapiens
  source 1..20: mol_type = genomic RNA
tccaggcaccggcgcccagc

SEQ ID NO: 7167 - RNA, 20 nt, Homo sapiens
  source 1..20: mol_type = genomic RNA
ccaggcaccggcgcccagcc

SEQ ID NO: 7168 - RNA, 20 nt, Homo sapiens
  source 1..20: mol_type = genomic RNA
caggcaccggcgcccagccc

SEQ ID NO: 7169 - RNA, 20 nt, Homo sapiens
  source 1..20: mol_type = genomic RNA
aggcaccggcgcccagcccc

SEQ ID NO: 7170 - RNA, 20 nt, Homo sapiens
  source 1..20: mol_type = genomic RNA
ggcaccggcgcccagccccc

SEQ ID NO: 7171 - RNA, 20 nt, Homo sapiens
  source 1..20: mol_type = genomic RNA
gcaccggcgcccagcccccg

SEQ ID NO: 7172 - RNA, 20 nt, Homo sapiens
  source 1..20: mol_type = genomic RNA
caccggcgcccagcccccgt

SEQ ID NO: 7173 - RNA, 20 nt, Homo sapiens
  source 1..20: mol_type = genomic RNA
accggcgcccagcccccgtg

SEQ ID NO: 7174 - RNA, 20 nt, Homo sapiens
  source 1..20: mol_type = genomic RNA
ccggcgcccagcccccgtgg

SEQ ID NO: 7175 - RNA, 20 nt, Homo sapiens
  source 1..20: mol_type = genomic RNA
cggcgcccagcccccgtggg

SEQ ID NO: 7176 - RNA, 20 nt, Homo sapiens
  source 1..20: mol_type = genomic RNA
ggcgcccagcccccgtgggg

SEQ ID NO: 7177 - RNA, 20 nt, Homo sapiens
  source 1..20: mol_type = genomic RNA
gcgcccagcccccgtggggt

SEQ ID NO: 7178 - RNA, 20 nt, Homo sapiens
  source 1..20: mol_type = genomic RNA
cgcccagcccccgtggggtg

SEQ ID NO: 7179 - RNA, 20 nt, Homo sapiens
  source 1..20: mol_type = genomic RNA
gcccagcccccgtggggtgt

SEQ ID NO: 7180 - RNA, 20 nt, Homo sapiens
  source 1..20: mol_type = genomic RNA
cccagcccccgtggggtgtc

SEQ ID NO: 7181 - RNA, 20 nt, Homo sapiens
  source 1..20: mol_type = genomic RNA
ccagcccccgtggggtgtcc

SEQ ID NO: 7182 - RNA, 20 nt, Homo sapiens
  source 1..20: mol_type = genomic RNA
cagcccccgtggggtgtcca

SEQ ID NO: 7183 - RNA, 20 nt, Homo sapiens
  source 1..20: mol_type = genomic RNA
agcccccgtggggtgtccag

SEQ ID NO: 7184 - RNA, 20 nt, Homo sapiens
  source 1..20: mol_type = genomic RNA
gcccccgtggggtgtccagg

SEQ ID NO: 7185 - RNA, 20 nt, Homo sapiens
  source 1..20: mol_type = genomic RNA
cccccgtggggtgtccaggg

SEQ ID NO: 7186 - RNA, 20 nt, Homo sapiens
  source 1..20: mol_type = genomic RNA
ccccgtggggtgtccagggc

SEQ ID NO: 7187 - RNA, 20 nt, Homo sapiens
  source 1..20: mol_type = genomic RNA
cccgtggggtgtccagggcg

SEQ ID NO: 7188 - RNA, 20 nt, Homo sapiens
  source 1..20: mol_type = genomic RNA
ccgtggggtgtccagggcgg

SEQ ID NO: 7189 - RNA, 20 nt, Homo sapiens
  source 1..20: mol_type = genomic RNA
cgtggggtgtccagggcggg

SEQ ID NO: 7190 - RNA, 20 nt, Homo sapiens
  source 1..20: mol_type = genomic RNA
gtggggtgtccagggcgggt

SEQ ID NO: 7191 - RNA, 20 nt, Homo sapiens
  source 1..20: mol_type = genomic RNA
tggggtgtccagggcgggtc

SEQ ID NO: 7192 - RNA, 20 nt, Homo sapiens
  source 1..20: mol_type = genomic RNA
ggggtgtccagggcgggtcc

SEQ ID NO: 7193 - RNA, 20 nt, Homo sapiens
  source 1..20: mol_type = genomic RNA
gggtgtccagggcgggtcca

SEQ ID NO: 7194 - RNA, 20 nt, Homo sapiens
  source 1..20: mol_type = genomic RNA
ggtgtccagggcgggtccag

SEQ ID NO: 7195 - RNA, 20 nt, Homo sapiens
  source 1..20: mol_type = genomic RNA
gtgtccagggcgggtccagg

SEQ ID NO: 7196 - RNA, 20 nt, Homo sapiens
  source 1..20: mol_type = genomic RNA
tgtccagggcgggtccaggc

SEQ ID NO: 7197 - RNA, 20 nt, Homo sapiens
  source 1..20: mol_type = genomic RNA
gtccagggcgggtccaggca

SEQ ID NO: 7198 - RNA, 20 nt, Homo sapiens
  source 1..20: mol_type = genomic RNA
tccagggcgggtccaggcac

SEQ ID NO: 7199 - RNA, 20 nt, Homo sapiens
  source 1..20: mol_type = genomic RNA
ccagggcgggtccaggcacc

SEQ ID NO: 7200 - RNA, 20 nt, Homo sapiens
  source 1..20: mol_type = genomic RNA
cagggcgggtccaggcaccg

SEQ ID NO: 7201 - RNA, 20 nt, Homo sapiens
  source 1..20: mol_type = genomic RNA
agggcgggtccaggcaccgg

SEQ ID NO: 7202 - RNA, 20 nt, Homo sapiens
  source 1..20: mol_type = genomic RNA
gggcgggtccaggcaccggc

SEQ ID NO: 7203 - RNA, 20 nt, Homo sapiens
  source 1..20: mol_type = genomic RNA
ggcgggtccaggcaccggcg

SEQ ID NO: 7204 - RNA, 20 nt, Homo sapiens
  source 1..20: mol_type = genomic RNA
gcgggtccaggcaccggcgc

SEQ ID NO: 7205 - RNA, 20 nt, Homo sapiens
  source 1..20: mol_type = genomic RNA
cgggtccaggcaccggcgcc

SEQ ID NO: 7206 - RNA, 20 nt, Homo sapiens
  source 1..20: mol_type = genomic RNA
gggtccaggcaccggcgccc

SEQ ID NO: 7207 - RNA, 20 nt, Homo sapiens
  source 1..20: mol_type = genomic RNA
ggtccaggcaccggcgccca

SEQ ID NO: 7208 - RNA, 20 nt, Homo sapiens
  source 1..20: mol_type = genomic RNA
gtccaggcaccggcgcccag

SEQ ID NO: 7209 - RNA, 20 nt, Homo sapiens
  source 1..20: mol_type = genomic RNA
tccaggcaccggcgcccagc

SEQ ID NO: 7210 - RNA, 20 nt, Homo sapiens
  source 1..20: mol_type = genomic RNA
ccaggcaccggcgcccagcc

SEQ ID NO: 7211 - RNA, 20 nt, Homo sapiens
  source 1..20: mol_type = genomic RNA
caggcaccggcgcccagccc

SEQ ID NO: 7212 - RNA, 20 nt, Homo sapiens
  source 1..20: mol_type = genomic RNA
aggcaccggcgcccagcccc

SEQ ID NO: 7213 - RNA, 20 nt, Homo sapiens
  source 1..20: mol_type = genomic RNA
ggcaccggcgcccagcccct

SEQ ID NO: 7214 - RNA, 20 nt, Homo sapiens
  source 1..20: mol_type = genomic RNA
gcaccggcgcccagcccctg

SEQ ID NO: 7215 - RNA, 20 nt, Homo sapiens
  source 1..20: mol_type = genomic RNA
caccggcgcccagcccctgt

SEQ ID NO: 7216 - RNA, 20 nt, Homo sapiens
  source 1..20: mol_type = genomic RNA
accggcgcccagcccctgtg

SEQ ID NO: 7217 - RNA, 20 nt, Homo sapiens
  source 1..20: mol_type = genomic RNA
ccggcgcccagcccctgtgg

SEQ ID NO: 7218 - RNA, 20 nt, Homo sapiens
  source 1..20: mol_type = genomic RNA
cggcgcccagcccctgtggg

SEQ ID NO: 7219 - RNA, 20 nt, Homo sapiens
  source 1..20: mol_type = genomic RNA
ggcgcccagcccctgtgggg

SEQ ID NO: 7220 - RNA, 20 nt, Homo sapiens
  source 1..20: mol_type = genomic RNA
gcgcccagcccctgtggggt

SEQ ID NO: 7221 - RNA, 20 nt, Homo sapiens
  source 1..20: mol_type = genomic RNA
cgcccagcccctgtggggtg

SEQ ID NO: 7222 - RNA, 20 nt, Homo sapiens
  source 1..20: mol_type = genomic RNA
gcccagcccctgtggggtgt

SEQ ID NO: 7223 - RNA, 20 nt, Homo sapiens
  source 1..20: mol_type = genomic RNA
cccagcccctgtggggtgtc

SEQ ID NO: 7224 - RNA, 20 nt, Homo sapiens
  source 1..20: mol_type = genomic RNA
ccagcccctgtggggtgtcc

SEQ ID NO: 7225 - RNA, 20 nt, Homo sapiens
  source 1..20: mol_type = genomic RNA
cagcccctgtggggtgtccg

SEQ ID NO: 7226 - RNA, 20 nt, Homo sapiens
  source 1..20: mol_type = genomic RNA
agcccctgtggggtgtccgg

SEQ ID NO: 7227 - RNA, 20 nt, Homo sapiens
  source 1..20: mol_type = genomic RNA
gcccctgtggggtgtccgga

SEQ ID NO: 7228 - RNA, 20 nt, Homo sapiens
  source 1..20: mol_type = genomic RNA
cccctgtggggtgtccggag

SEQ ID NO: 7229 - RNA, 20 nt, Homo sapiens
  source 1..20: mol_type = genomic RNA
ccctgtggggtgtccggagt

SEQ ID NO: 7230 - RNA, 20 nt, Homo sapiens
  source 1..20: mol_type = genomic RNA
cctgtggggtgtccggagtg

SEQ ID NO: 7231 - RNA, 20 nt, Homo sapiens
  source 1..20: mol_type = genomic RNA
ctgtggggtgtccggagtgg

SEQ ID NO: 7232 - RNA, 20 nt, Homo sapiens
  source 1..20: mol_type = genomic RNA
tgtggggtgtccggagtggg

SEQ ID NO: 7233 - RNA, 20 nt, Homo sapiens
  source 1..20: mol_type = genomic RNA
gtggggtgtccggagtgggt

SEQ ID NO: 7234 - RNA, 20 nt, Homo sapiens
  source 1..20: mol_type = genomic RNA
tggggtgtccggagtgggtc

SEQ ID NO: 7235 - RNA, 20 nt, Homo sapiens
  source 1..20: mol_type = genomic RNA
ggggtgtccggagtgggtcc

SEQ ID NO: 7236 - RNA, 20 nt, Homo sapiens
  source 1..20: mol_type = genomic RNA
gggtgtccggagtgggtccg

SEQ ID NO: 7237 - RNA, 20 nt, Homo sapiens
  source 1..20: mol_type = genomic RNA
ggtgtccggagtgggtccgg

SEQ ID NO: 7238 - RNA, 20 nt, Homo sapiens
  source 1..20: mol_type = genomic RNA
gtgtccggagtgggtccggg

SEQ ID NO: 7239 - RNA, 20 nt, Homo sapiens
  source 1..20: mol_type = genomic RNA
tgtccggagtgggtccgggc

SEQ ID NO: 7240 - RNA, 20 nt, Homo sapiens
  source 1..20: mol_type = genomic RNA
gtccggagtgggtccgggca

SEQ ID NO: 7241 - RNA, 20 nt, Homo sapiens
  source 1..20: mol_type = genomic RNA
tccggagtgggtccgggcac

SEQ ID NO: 7242 - RNA, 20 nt, Homo sapiens
  source 1..20: mol_type = genomic RNA
ccggagtgggtccgggcacc

SEQ ID NO: 7243 - RNA, 20 nt, Homo sapiens
  source 1..20: mol_type = genomic RNA
cggagtgggtccgggcaccg

SEQ ID NO: 7244 - RNA, 20 nt, Homo sapiens
  source 1..20: mol_type = genomic RNA
ggagtgggtccgggcaccgc

SEQ ID NO: 7245 - RNA, 20 nt, Homo sapiens
  source 1..20: mol_type = genomic RNA
gagtgggtccgggcaccgcc

SEQ ID NO: 7246 - RNA, 20 nt, Homo sapiens
  source 1..20: mol_type = genomic RNA
agtgggtccgggcaccgcca

SEQ ID NO: 7247 - RNA, 20 nt, Homo sapiens
  source 1..20: mol_type = genomic RNA
gtgggtccgggcaccgccag

SEQ ID NO: 7248 - RNA, 20 nt, Homo sapiens
  source 1..20: mol_type = genomic RNA
tgggtccgggcaccgccagc

SEQ ID NO: 7249 - RNA, 20 nt, Homo sapiens
  source 1..20: mol_type = genomic RNA
gggtccgggcaccgccagct

SEQ ID NO: 7250 - RNA, 20 nt, Homo sapiens
  source 1..20: mol_type = genomic RNA
ggtccgggcaccgccagctt

SEQ ID NO: 7251 - RNA, 20 nt, Homo sapiens
  source 1..20: mol_type = genomic RNA
gtccgggcaccgccagcttc

SEQ ID NO: 7252 - RNA, 20 nt, Homo sapiens
  source 1..20: mol_type = genomic RNA
tccgggcaccgccagcttct

SEQ ID NO: 7253 - RNA, 20 nt, Homo sapiens
  source 1..20: mol_type = genomic RNA
ccgggcaccgccagcttctc

SEQ ID NO: 7254 - RNA, 20 nt, Homo sapiens
  source 1..20: mol_type = genomic RNA
cgggcaccgccagcttctct

SEQ ID NO: 7255 - RNA, 20 nt, Homo sapiens
  source 1..20: mol_type = genomic RNA
gggcaccgccagcttctctc

SEQ ID NO: 7256 - RNA, 20 nt, Homo sapiens
  source 1..20: mol_type = genomic RNA
ggcaccgccagcttctctct

SEQ ID NO: 7257 - RNA, 20 nt, Homo sapiens
  source 1..20: mol_type = genomic RNA
gcaccgccagcttctctctg

SEQ ID NO: 7258 - RNA, 20 nt, Homo sapiens
  source 1..20: mol_type = genomic RNA
caccgccagcttctctctgt

SEQ ID NO: 7259 - RNA, 20 nt, Homo sapiens
  source 1..20: mol_type = genomic RNA
accgccagcttctctctgtg

SEQ ID NO: 7260 - RNA, 20 nt, Homo sapiens
  source 1..20: mol_type = genomic RNA
ccgccagcttctctctgtgg

SEQ ID NO: 7261 - RNA, 20 nt, Homo sapiens
  source 1..20: mol_type = genomic RNA
cgccagcttctctctgtggc

SEQ ID NO: 7262 - RNA, 20 nt, Homo sapiens
  source 1..20: mol_type = genomic RNA
gccagcttctctctgtggca

SEQ ID NO: 7263 - RNA, 20 nt, Homo sapiens
  source 1..20: mol_type = genomic RNA
ccagcttctctctgtggcag

SEQ ID NO: 7264 - RNA, 20 nt, Homo sapiens
  source 1..20: mol_type = genomic RNA
cagcttctctctgtggcagc

SEQ ID NO: 7265 - RNA, 20 nt, Homo sapiens
  source 1..20: mol_type = genomic RNA
agcttctctctgtggcagcc

SEQ ID NO: 7266 - RNA, 20 nt, Homo sapiens
  source 1..20: mol_type = genomic RNA
gcttctctctgtggcagcca

SEQ ID NO: 7267 - RNA, 20 nt, Homo sapiens
  source 1..20: mol_type = genomic RNA
cttctctctgtggcagccac

SEQ ID NO: 7268 - RNA, 20 nt, Homo sapiens
  source 1..20: mol_type = genomic RNA
ttctctctgtggcagccact

SEQ ID NO: 7269 - RNA, 20 nt, Homo sapiens
  source 1..20: mol_type = genomic RNA
tctctctgtggcagccactc

SEQ ID NO: 7270 - RNA, 20 nt, Homo sapiens
  source 1..20: mol_type = genomic RNA
ctctctgtggcagccactcc

SEQ ID NO: 7271 - RNA, 20 nt, Homo sapiens
  source 1..20: mol_type = genomic RNA
tctctgtggcagccactcct

SEQ ID NO: 7272 - RNA, 20 nt, Homo sapiens
  source 1..20: mol_type = genomic RNA
ctctgtggcagccactcctg

SEQ ID NO: 7273 - RNA, 20 nt, Homo sapiens
  source 1..20: mol_type = genomic RNA
tctgtggcagccactcctgc

SEQ ID NO: 7274 - RNA, 20 nt, Homo sapiens
  source 1..20: mol_type = genomic RNA
ctgtggcagccactcctgca

SEQ ID NO: 7275 - RNA, 20 nt, Homo sapiens
  source 1..20: mol_type = genomic RNA
tgtggcagccactcctgcag

SEQ ID NO: 7276 - RNA, 20 nt, Homo sapiens
  source 1..20: mol_type = genomic RNA
gtggcagccactcctgcagc

SEQ ID NO: 7277 - RNA, 20 nt, Homo sapiens
  source 1..20: mol_type = genomic RNA
tggcagccactcctgcagct

SEQ ID NO: 7278 - RNA, 20 nt, Homo sapiens
  source 1..20: mol_type = genomic RNA
ggcagccactcctgcagctc

SEQ ID NO: 7279 - RNA, 20 nt, Homo sapiens
  source 1..20: mol_type = genomic RNA
gcagccactcctgcagctct

SEQ ID NO: 7280 - RNA, 20 nt, Homo sapiens
  source 1..20: mol_type = genomic RNA
cagccactcctgcagctctc

SEQ ID NO: 7281 - RNA, 20 nt, Homo sapiens
  source 1..20: mol_type = genomic RNA
agccactcctgcagctctcg

SEQ ID NO: 7282 - RNA, 20 nt, Homo sapiens
  source 1..20: mol_type = genomic RNA
gccactcctgcagctctcgt

SEQ ID NO: 7283 - RNA, 20 nt, Homo sapiens
  source 1..20: mol_type = genomic RNA
ccactcctgcagctctcgtt

SEQ ID NO: 7284 - RNA, 20 nt, Homo sapiens
  source 1..20: mol_type = genomic RNA
cactcctgcagctctcgttt

SEQ ID NO: 7285 - RNA, 20 nt, Homo sapiens
  source 1..20: mol_type = genomic RNA
actcctgcagctctcgtttg

SEQ ID NO: 7286 - RNA, 20 nt, Homo sapiens
  source 1..20: mol_type = genomic RNA
ctcctgcagctctcgtttgc

SEQ ID NO: 7287 - RNA, 20 nt, Homo sapiens
  source 1..20: mol_type = genomic RNA
tcctgcagctctcgtttgcc

SEQ ID NO: 7288 - RNA, 20 nt, Homo sapiens
  source 1..20: mol_type = genomic RNA
cctgcagctctcgtttgccc

SEQ ID NO: 7289 - RNA, 20 nt, Homo sapiens
  source 1..20: mol_type = genomic RNA
ctgcagctctcgtttgcccc

SEQ ID NO: 7290 - RNA, 20 nt, Homo sapiens
  source 1..20: mol_type = genomic RNA
tgcagctctcgtttgcccct

SEQ ID NO: 7291 - RNA, 20 nt, Homo sapiens
  source 1..20: mol_type = genomic RNA
gcagctctcgtttgcccctc

SEQ ID NO: 7292 - RNA, 20 nt, Homo sapiens
  source 1..20: mol_type = genomic RNA
cagctctcgtttgcccctca

SEQ ID NO: 7293 - RNA, 20 nt, Homo sapiens
  source 1..20: mol_type = genomic RNA
agctctcgtttgcccctcag

SEQ ID NO: 7294 - RNA, 20 nt, Homo sapiens
  source 1..20: mol_type = genomic RNA
gctctcgtttgcccctcagt

SEQ ID NO: 7295 - RNA, 20 nt, Homo sapiens
  source 1..20: mol_type = genomic RNA
ctctcgtttgcccctcagtt

SEQ ID NO: 7296 - RNA, 20 nt, Homo sapiens
  source 1..20: mol_type = genomic RNA
tctcgtttgcccctcagttc

SEQ ID NO: 7297 - RNA, 20 nt, Homo sapiens
  source 1..20: mol_type = genomic RNA
ctcgtttgcccctcagttcc

SEQ ID NO: 7298 - RNA, 20 nt, Homo sapiens
  source 1..20: mol_type = genomic RNA
tcgtttgcccctcagttcca

SEQ ID NO: 7299 - RNA, 20 nt, Homo sapiens
  source 1..20: mol_type = genomic RNA
cgtttgcccctcagttccag

SEQ ID NO: 7300 - RNA, 20 nt, Homo sapiens
  source 1..20: mol_type = genomic RNA
gtttgcccctcagttccagg

SEQ ID NO: 7301 - RNA, 20 nt, Homo sapiens
  source 1..20: mol_type = genomic RNA
tttgcccctcagttccagga

SEQ ID NO: 7302 - RNA, 20 nt, Homo sapiens
  source 1..20: mol_type = genomic RNA
ttgcccctcagttccaggag

SEQ ID NO: 7303 - RNA, 20 nt, Homo sapiens
  source 1..20: mol_type = genomic RNA
tgcccctcagttccaggagc

SEQ ID NO: 7304 - RNA, 20 nt, Homo sapiens
  source 1..20: mol_type = genomic RNA
gcccctcagttccaggagca

SEQ ID NO: 7305 - RNA, 20 nt, Homo sapiens
  source 1..20: mol_type = genomic RNA
cccctcagttccaggagcaa

SEQ ID NO: 7306 - RNA, 20 nt, Homo sapiens
  source 1..20: mol_type = genomic RNA
ccctcagttccaggagcaac

SEQ ID NO: 7307 - RNA, 20 nt, Homo sapiens
  source 1..20: mol_type = genomic RNA
cctcagttccaggagcaaca

SEQ ID NO: 7308 - RNA, 20 nt, Homo sapiens
  source 1..20: mol_type = genomic RNA
ctcagttccaggagcaacat

SEQ ID NO: 7309 - RNA, 20 nt, Homo sapiens
  source 1..20: mol_type = genomic RNA
tcagttccaggagcaacata

SEQ ID NO: 7310 - RNA, 20 nt, Homo sapiens
  source 1..20: mol_type = genomic RNA
cagttccaggagcaacatag

SEQ ID NO: 7311 - RNA, 20 nt, Homo sapiens
  source 1..20: mol_type = genomic RNA
agttccaggagcaacataga

SEQ ID NO: 7312 - RNA, 20 nt, Homo sapiens
  source 1..20: mol_type = genomic RNA
gttccaggagcaacatagat

SEQ ID NO: 7313 - RNA, 20 nt, Homo sapiens
  source 1..20: mol_type = genomic RNA
ttccaggagcaacatagatg

SEQ ID NO: 7314 - RNA, 20 nt, Homo sapiens
  source 1..20: mol_type = genomic RNA
tccaggagcaacatagatgt

SEQ ID NO: 7315 - RNA, 20 nt, Homo sapiens
  source 1..20: mol_type = genomic RNA
ccaggagcaacatagatgtg

SEQ ID NO: 7316 - RNA, 20 nt, Homo sapiens
  source 1..20: mol_type = genomic RNA
caggagcaacatagatgtgg

SEQ ID NO: 7317 - RNA, 20 nt, Homo sapiens
  source 1..20: mol_type = genomic RNA
aggagcaacatagatgtgga

SEQ ID NO: 7318 - RNA, 20 nt, Homo sapiens
  source 1..20: mol_type = genomic RNA
ggagcaacatagatgtggat

SEQ ID NO: 7319 - RNA, 20 nt, Homo sapiens
  source 1..20: mol_type = genomic RNA
gagcaacatagatgtggatt

SEQ ID NO: 7320 - RNA, 20 nt, Homo sapiens
  source 1..20: mol_type = genomic RNA
agcaacatagatgtggattc

SEQ ID NO: 7321 - RNA, 20 nt, Homo sapiens
  source 1..20: mol_type = genomic RNA
gcaacatagatgtggattcc

SEQ ID NO: 7322 - RNA, 20 nt, Homo sapiens
  source 1..20: mol_type = genomic RNA
caacatagatgtggattcct

SEQ ID NO: 7323 - RNA, 20 nt, Homo sapiens
  source 1..20: mol_type = genomic RNA
aacatagatgtggattcctg

SEQ ID NO: 7324 - RNA, 20 nt, Homo sapiens
  source 1..20: mol_type = genomic RNA
acatagatgtggattcctgt

SEQ ID NO: 7325 - RNA, 20 nt, Homo sapiens
  source 1..20: mol_type = genomic RNA
catagatgtggattcctgtc

SEQ ID NO: 7326 - RNA, 20 nt, Homo sapiens
  source 1..20: mol_type = genomic RNA
atagatgtggattcctgtcc

SEQ ID NO: 7327 - RNA, 20 nt, Homo sapiens
  source 1..20: mol_type = genomic RNA
tagatgtggattcctgtcca

SEQ ID NO: 7328 - RNA, 20 nt, Homo sapiens
  source 1..20: mol_type = genomic RNA
agatgtggattcctgtccaa

SEQ ID NO: 7329 - RNA, 20 nt, Homo sapiens
  source 1..20: mol_type = genomic RNA
gatgtggattcctgtccaat

SEQ ID NO: 7330 - RNA, 20 nt, Homo sapiens
  source 1..20: mol_type = genomic RNA
atgtggattcctgtccaatt

SEQ ID NO: 7331 - RNA, 20 nt, Homo sapiens
  source 1..20: mol_type = genomic RNA
tgtggattcctgtccaattt

SEQ ID NO: 7332 - RNA, 20 nt, Homo sapiens
  source 1..20: mol_type = genomic RNA
gtggattcctgtccaatttg

SEQ ID NO: 7333 - RNA, 20 nt, Homo sapiens
  source 1..20: mol_type = genomic RNA
tggattcctgtccaatttgg

SEQ ID NO: 7334 - RNA, 20 nt, Homo sapiens
  source 1..20: mol_type = genomic RNA
ggattcctgtccaatttggg

SEQ ID NO: 7335 - RNA, 20 nt, Homo sapiens
  source 1..20: mol_type = genomic RNA
gattcctgtccaatttggga

SEQ ID NO: 7336 - RNA, 20 nt, Homo sapiens
  source 1..20: mol_type = genomic RNA
attcctgtccaatttgggaa

SEQ ID NO: 7337 - RNA, 20 nt, Homo sapiens
  source 1..20: mol_type = genomic RNA
ttcctgtccaatttgggaaa

SEQ ID NO: 7338 - RNA, 20 nt, Homo sapiens
  source 1..20: mol_type = genomic RNA
tcctgtccaatttgggaaaa

SEQ ID NO: 7339 - RNA, 20 nt, Homo sapiens
  source 1..20: mol_type = genomic RNA
cctgtccaatttgggaaaaa

SEQ ID NO: 7340 - RNA, 20 nt, Homo sapiens
  source 1..20: mol_type = genomic RNA
ctgtccaatttgggaaaaat

SEQ ID NO: 7341 - RNA, 20 nt, Homo sapiens
  source 1..20: mol_type = genomic RNA
tgtccaatttgggaaaaatg

SEQ ID NO: 7342 - RNA, 20 nt, Homo sapiens
  source 1..20: mol_type = genomic RNA
gtccaatttgggaaaaatgt

SEQ ID NO: 7343 - RNA, 20 nt, Homo sapiens
  source 1..20: mol_type = genomic RNA
tccaatttgggaaaaatgtc

SEQ ID NO: 7344 - RNA, 20 nt, Homo sapiens
  source 1..20: mol_type = genomic RNA
ccaatttgggaaaaatgtcc

SEQ ID NO: 7345 - RNA, 20 nt, Homo sapiens
  source 1..20: mol_type = genomic RNA
caatttgggaaaaatgtcca

SEQ ID NO: 7346 - RNA, 20 nt, Homo sapiens
  source 1..20: mol_type = genomic RNA
aatttgggaaaaatgtccac

SEQ ID NO: 7347 - RNA, 20 nt, Homo sapiens
  source 1..20: mol_type = genomic RNA
atttgggaaaaatgtccaca

SEQ ID NO: 7348 - RNA, 20 nt, Homo sapiens
  source 1..20: mol_type = genomic RNA
tttgggaaaaatgtccacac

SEQ ID NO: 7349 - RNA, 20 nt, Homo sapiens
  source 1..20: mol_type = genomic RNA
ttgggaaaaatgtccacaca

SEQ ID NO: 7350 - RNA, 20 nt, Homo sapiens
  source 1..20: mol_type = genomic RNA
tgggaaaaatgtccacacac

SEQ ID NO: 7351 - RNA, 20 nt, Homo sapiens
  source 1..20: mol_type = genomic RNA
gggaaaaatgtccacacacg

SEQ ID NO: 7352 - RNA, 20 nt, Homo sapiens
  source 1..20: mol_type = genomic RNA
ggaaaaatgtccacacacgg

SEQ ID NO: 7353 - RNA, 20 nt, Homo sapiens
  source 1..20: mol_type = genomic RNA
gaaaaatgtccacacacggt

SEQ ID NO: 7354 - RNA, 20 nt, Homo sapiens
  source 1..20: mol_type = genomic RNA
aaaaatgtccacacacggtc

SEQ ID NO: 7355 - RNA, 20 nt, Homo sapiens
  source 1..20: mol_type = genomic RNA
aaaatgtccacacacggtca

SEQ ID NO: 7356 - RNA, 20 nt, Homo sapiens
  source 1..20: mol_type = genomic RNA
aaatgtccacacacggtcac

SEQ ID NO: 7357 - RNA, 20 nt, Homo sapiens
  source 1..20: mol_type = genomic RNA
aatgtccacacacggtcacc

SEQ ID NO: 7358 - RNA, 20 nt, Homo sapiens
  source 1..20: mol_type = genomic RNA
atgtccacacacggtcaccc

SEQ ID NO: 7359 - RNA, 20 nt, Homo sapiens
  source 1..20: mol_type = genomic RNA
tgtccacacacggtcaccca

SEQ ID NO: 7360 - RNA, 20 nt, Homo sapiens
  source 1..20: mol_type = genomic RNA
gtccacacacggtcacccac

SEQ ID NO: 7361 - RNA, 20 nt, Homo sapiens
  source 1..20: mol_type = genomic RNA
tccacacacggtcacccacc

SEQ ID NO: 7362 - RNA, 20 nt, Homo sapiens
  source 1..20: mol_type = genomic RNA
ccacacacggtcacccacct

SEQ ID NO: 7363 - RNA, 20 nt, Homo sapiens
  source 1..20: mol_type = genomic RNA
cacacacggtcacccacctg

SEQ ID NO: 7364 - RNA, 20 nt, Homo sapiens
  source 1..20: mol_type = genomic RNA
acacacggtcacccacctgg

SEQ ID NO: 7365 - RNA, 20 nt, Homo sapiens
  source 1..20: mol_type = genomic RNA
cacacggtcacccacctggc

SEQ ID NO: 7366 - RNA, 20 nt, Homo sapiens
  source 1..20: mol_type = genomic RNA
acacggtcacccacctggca

SEQ ID NO: 7367 - RNA, 20 nt, Homo sapiens
  source 1..20: mol_type = genomic RNA
cacggtcacccacctggcag

SEQ ID NO: 7368 - RNA, 20 nt, Homo sapiens
  source 1..20: mol_type = genomic RNA
acggtcacccacctggcagg

SEQ ID NO: 7369 - RNA, 20 nt, Homo sapiens
  source 1..20: mol_type = genomic RNA
cggtcacccacctggcaggt

SEQ ID NO: 7370 - RNA, 20 nt, Homo sapiens
  source 1..20: mol_type = genomic RNA
ggtcacccacctggcaggtg

SEQ ID NO: 7371 - RNA, 20 nt, Homo sapiens
  source 1..20: mol_type = genomic RNA
gtcacccacctggcaggtgc

SEQ ID NO: 7372 - RNA, 20 nt, Homo sapiens
  source 1..20: mol_type = genomic RNA
tcacccacctggcaggtgcc

SEQ ID NO: 7373 - RNA, 20 nt, Homo sapiens
  source 1..20: mol_type = genomic RNA
cacccacctggcaggtgcct

SEQ ID NO: 7374 - RNA, 20 nt, Homo sapiens
  source 1..20: mol_type = genomic RNA
acccacctggcaggtgcctc

SEQ ID NO: 7375 - RNA, 20 nt, Homo sapiens
  source 1..20: mol_type = genomic RNA
cccacctggcaggtgcctct

SEQ ID NO: 7376 - RNA, 20 nt, Homo sapiens
  source 1..20: mol_type = genomic RNA
ccacctggcaggtgcctctg

SEQ ID NO: 7377 - RNA, 20 nt, Homo sapiens
  source 1..20: mol_type = genomic RNA
cacctggcaggtgcctctgg

SEQ ID NO: 7378 - RNA, 20 nt, Homo sapiens
  source 1..20: mol_type = genomic RNA
acctggcaggtgcctctggc

SEQ ID NO: 7379 - RNA, 20 nt, Homo sapiens
  source 1..20: mol_type = genomic RNA
cctggcaggtgcctctggct

SEQ ID NO: 7380 - RNA, 20 nt, Homo sapiens
  source 1..20: mol_type = genomic RNA
ctggcaggtgcctctggctg

SEQ ID NO: 7381 - RNA, 20 nt, Homo sapiens
  source 1..20: mol_type = genomic RNA
tggcaggtgcctctggctgc

SEQ ID NO: 7382 - RNA, 20 nt, Homo sapiens
  source 1..20: mol_type = genomic RNA
ggcaggtgcctctggctgca

SEQ ID NO: 7383 - RNA, 20 nt, Homo sapiens
  source 1..20: mol_type = genomic RNA
gcaggtgcctctggctgcaa

SEQ ID NO: 7384 - RNA, 20 nt, Homo sapiens
  source 1..20: mol_type = genomic RNA
caggtgcctctggctgcaag

SEQ ID NO: 7385 - RNA, 20 nt, Homo sapiens
  source 1..20: mol_type = genomic RNA
aggtgcctctggctgcaagg

SEQ ID NO: 7386 - RNA, 20 nt, Homo sapiens
  source 1..20: mol_type = genomic RNA
ggtgcctctggctgcaaggg

SEQ ID NO: 7387 - RNA, 20 nt, Homo sapiens
  source 1..20: mol_type = genomic RNA
gtgcctctggctgcaagggg

SEQ ID NO: 7388 - RNA, 20 nt, Homo sapiens
  source 1..20: mol_type = genomic RNA
tgcctctggctgcaaggggc

SEQ ID NO: 7389 - RNA, 20 nt, Homo sapiens
  source 1..20: mol_type = genomic RNA
gcctctggctgcaaggggcg

SEQ ID NO: 7390 - RNA, 20 nt, Homo sapiens
  source 1..20: mol_type = genomic RNA
cctctggctgcaaggggcgc

SEQ ID NO: 7391 - RNA, 20 nt, Homo sapiens
  source 1..20: mol_type = genomic RNA
ctctggctgcaaggggcgct

SEQ ID NO: 7392 - RNA, 20 nt, Homo sapiens
  source 1..20: mol_type = genomic RNA
tctggctgcaaggggcgctg

SEQ ID NO: 7393 - RNA, 20 nt, Homo sapiens
  source 1..20: mol_type = genomic RNA
ctggctgcaaggggcgctgg

SEQ ID NO: 7394 - RNA, 20 nt, Homo sapiens
  source 1..20: mol_type = genomic RNA
tggctgcaaggggcgctggg

SEQ ID NO: 7395 - RNA, 20 nt, Homo sapiens
  source 1..20: mol_type = genomic RNA
ggctgcaaggggcgctgggc

SEQ ID NO: 7396 - RNA, 20 nt, Homo sapiens
  source 1..20: mol_type = genomic RNA
gctgcaaggggcgctgggct

SEQ ID NO: 7397 - RNA, 20 nt, Homo sapiens
  source 1..20: mol_type = genomic RNA
ctgcaaggggcgctgggctt

SEQ ID NO: 7398 - RNA, 20 nt, Homo sapiens
  source 1..20: mol_type = genomic RNA
tgcaaggggcgctgggcttc

SEQ ID NO: 7399 - RNA, 20 nt, Homo sapiens
  source 1..20: mol_type = genomic RNA
gcaaggggcgctgggcttcg

SEQ ID NO: 7400 - RNA, 20 nt, Homo sapiens
  source 1..20: mol_type = genomic RNA
caaggggcgctgggcttcgc

SEQ ID NO: 7401 - RNA, 20 nt, Homo sapiens
  source 1..20: mol_type = genomic RNA
aaggggcgctgggcttcgca

SEQ ID NO: 7402 - RNA, 20 nt, Homo sapiens
  source 1..20: mol_type = genomic RNA
aggggcgctgggcttcgcag

SEQ ID NO: 7403 - RNA, 20 nt, Homo sapiens
  source 1..20: mol_type = genomic RNA
ggggcgctgggcttcgcagg

SEQ ID NO: 7404 - RNA, 20 nt, Homo sapiens
  source 1..20: mol_type = genomic RNA
gggcgctgggcttcgcaggc

SEQ ID NO: 7405 - RNA, 20 nt, Homo sapiens
  source 1..20: mol_type = genomic RNA
ggcgctgggcttcgcaggca

SEQ ID NO: 7406 - RNA, 20 nt, Homo sapiens
  source 1..20: mol_type = genomic RNA
gcgctgggcttcgcaggcag

SEQ ID NO: 7407 - RNA, 20 nt, Homo sapiens
  source 1..20: mol_type = genomic RNA
cgctgggcttcgcaggcagg

SEQ ID NO: 7408 - RNA, 20 nt, Homo sapiens
  source 1..20: mol_type = genomic RNA
gctgggcttcgcaggcaggc

SEQ ID NO: 7409 - RNA, 20 nt, Homo sapiens
  source 1..20: mol_type = genomic RNA
ctgggcttcgcaggcaggcc

SEQ ID NO: 7410 - RNA, 20 nt, Homo sapiens
  source 1..20: mol_type = genomic RNA
tgggcttcgcaggcaggcca

SEQ ID NO: 7411 - RNA, 20 nt, Homo sapiens
  source 1..20: mol_type = genomic RNA
gggcttcgcaggcaggccag

SEQ ID NO: 7412 - RNA, 20 nt, Homo sapiens
  source 1..20: mol_type = genomic RNA
ggcttcgcaggcaggccagc

SEQ ID NO: 7413 - RNA, 20 nt, Homo sapiens
  source 1..20: mol_type = genomic RNA
gcttcgcaggcaggccagcc

SEQ ID NO: 7414 - RNA, 20 nt, Homo sapiens
  source 1..20: mol_type = genomic RNA
cttcgcaggcaggccagccg

SEQ ID NO: 7415 - RNA, 20 nt, Homo sapiens
  source 1..20: mol_type = genomic RNA
ttcgcaggcaggccagccgg

SEQ ID NO: 7416 - RNA, 20 nt, Homo sapiens
  source 1..20: mol_type = genomic RNA
tcgcaggcaggccagccggg

SEQ ID NO: 7417 - RNA, 20 nt, Homo sapiens
  source 1..20: mol_type = genomic RNA
cgcaggcaggccagccgggc

SEQ ID NO: 7418 - RNA, 20 nt, Homo sapiens
  source 1..20: mol_type = genomic RNA
gcaggcaggccagccgggct

SEQ ID NO: 7419 - RNA, 20 nt, Homo sapiens
  source 1..20: mol_type = genomic RNA
caggcaggccagccgggctc

SEQ ID NO: 7420 - RNA, 20 nt, Homo sapiens
  source 1..20: mol_type = genomic RNA
aggcaggccagccgggctcc

SEQ ID NO: 7421 - RNA, 20 nt, Homo sapiens
  source 1..20: mol_type = genomic RNA
ggcaggccagccgggctccc

SEQ ID NO: 7422 - RNA, 20 nt, Homo sapiens
  source 1..20: mol_type = genomic RNA
gcaggccagccgggctcccc

SEQ ID NO: 7423 - RNA, 20 nt, Homo sapiens
  source 1..20: mol_type = genomic RNA
caggccagccgggctccccg

SEQ ID NO: 7424 - RNA, 20 nt, Homo sapiens
  source 1..20: mol_type = genomic RNA
aggccagccgggctccccgc

SEQ ID NO: 7425 - RNA, 20 nt, Homo sapiens
  source 1..20: mol_type = genomic RNA
ggccagccgggctccccgcc

SEQ ID NO: 7426 - RNA, 20 nt, Homo sapiens
  source 1..20: mol_type = genomic RNA
gccagccgggctccccgcca

SEQ ID NO: 7427 - RNA, 20 nt, Homo sapiens
  source 1..20: mol_type = genomic RNA
ccagccgggctccccgccat

SEQ ID NO: 7428 - RNA, 20 nt, Homo sapiens
  source 1..20: mol_type = genomic RNA
cagccgggctccccgccatg

SEQ ID NO: 7429 - RNA, 20 nt, Homo sapiens
  source 1..20: mol_type = genomic RNA
agccgggctccccgccatgg

SEQ ID NO: 7430 - RNA, 20 nt, Homo sapiens
  source 1..20: mol_type = genomic RNA
gccgggctccccgccatggg

SEQ ID NO: 7431 - RNA, 20 nt, Homo sapiens
  source 1..20: mol_type = genomic RNA
ccgggctccccgccatgggc

SEQ ID NO: 7432 - RNA, 20 nt, Homo sapiens
  source 1..20: mol_type = genomic RNA
cgggctccccgccatgggcc

SEQ ID NO: 7433 - RNA, 20 nt, Homo sapiens
  source 1..20: mol_type = genomic RNA
gggctccccgccatgggcca

SEQ ID NO: 7434 - RNA, 20 nt, Homo sapiens
  source 1..20: mol_type = genomic RNA
ggctccccgccatgggccag

SEQ ID NO: 7435 - RNA, 20 nt, Homo sapiens
  source 1..20: mol_type = genomic RNA
gctccccgccatgggccagg

SEQ ID NO: 7436 - RNA, 20 nt, Homo sapiens
  source 1..20: mol_type = genomic RNA
ctccccgccatgggccagga

SEQ ID NO: 7437 - RNA, 20 nt, Homo sapiens
  source 1..20: mol_type = genomic RNA
tccccgccatgggccaggat

SEQ ID NO: 7438 - RNA, 20 nt, Homo sapiens
  source 1..20: mol_type = genomic RNA
ccccgccatgggccaggatc

SEQ ID NO: 7439 - RNA, 20 nt, Homo sapiens
  source 1..20: mol_type = genomic RNA
cccgccatgggccaggatcc

SEQ ID NO: 7440 - RNA, 20 nt, Homo sapiens
  source 1..20: mol_type = genomic RNA
ccgccatgggccaggatccc

SEQ ID NO: 7441 - RNA, 20 nt, Homo sapiens
  source 1..20: mol_type = genomic RNA
cgccatgggccaggatcccc

SEQ ID NO: 7442 - RNA, 20 nt, Homo sapiens
  source 1..20: mol_type = genomic RNA
gccatgggccaggatcccct

SEQ ID NO: 7443 - RNA, 20 nt, Homo sapiens
  source 1..20: mol_type = genomic RNA
ccatgggccaggatcccctc

SEQ ID NO: 7444 - RNA, 20 nt, Homo sapiens
  source 1..20: mol_type = genomic RNA
catgggccaggatcccctcc

SEQ ID NO: 7445 - RNA, 20 nt, Homo sapiens
  source 1..20: mol_type = genomic RNA
atgggccaggatcccctccg

SEQ ID NO: 7446 - RNA, 20 nt, Homo sapiens
  source 1..20: mol_type = genomic RNA
tgggccaggatcccctccga

SEQ ID NO: 7447 - RNA, 20 nt, Homo sapiens
  source 1..20: mol_type = genomic RNA
gggccaggatcccctccgag

SEQ ID NO: 7448 - RNA, 20 nt, Homo sapiens
  source 1..20: mol_type = genomic RNA
ggccaggatcccctccgagc

SEQ ID NO: 7449 - RNA, 20 nt, Homo sapiens
  source 1..20: mol_type = genomic RNA
gccaggatcccctccgagcc

SEQ ID NO: 7450 - RNA, 20 nt, Homo sapiens
  source 1..20: mol_type = genomic RNA
ccaggatcccctccgagccc

SEQ ID NO: 7451 - RNA, 20 nt, Homo sapiens
  source 1..20: mol_type = genomic RNA
caggatcccctccgagccct

SEQ ID NO: 7452 - RNA, 20 nt, Homo sapiens
  source 1..20: mol_type = genomic RNA
aggatcccctccgagccctg

SEQ ID NO: 7453 - RNA, 20 nt, Homo sapiens
  source 1..20: mol_type = genomic RNA
ggatcccctccgagccctgt

SEQ ID NO: 7454 - RNA, 20 nt, Homo sapiens
  source 1..20: mol_type = genomic RNA
gatcccctccgagccctgtt

SEQ ID NO: 7455 - RNA, 20 nt, Homo sapiens
  source 1..20: mol_type = genomic RNA
atcccctccgagccctgttt

SEQ ID NO: 7456 - RNA, 20 nt, Homo sapiens
  source 1..20: mol_type = genomic RNA
tcccctccgagccctgtttg

SEQ ID NO: 7457 - RNA, 20 nt, Homo sapiens
  source 1..20: mol_type = genomic RNA
cccctccgagccctgtttgc

SEQ ID NO: 7458 - RNA, 20 nt, Homo sapiens
  source 1..20: mol_type = genomic RNA
ccctccgagccctgtttgcc

SEQ ID NO: 7459 - RNA, 20 nt, Homo sapiens
  source 1..20: mol_type = genomic RNA
cctccgagccctgtttgccg

SEQ ID NO: 7460 - RNA, 20 nt, Homo sapiens
  source 1..20: mol_type = genomic RNA
ctccgagccctgtttgccgc

SEQ ID NO: 7461 - RNA, 20 nt, Homo sapiens
  source 1..20: mol_type = genomic RNA
tccgagccctgtttgccgcc

SEQ ID NO: 7462 - RNA, 20 nt, Homo sapiens
  source 1..20: mol_type = genomic RNA
ccgagccctgtttgccgccc

SEQ ID NO: 7463 - RNA, 20 nt, Homo sapiens
  source 1..20: mol_type = genomic RNA
cgagccctgtttgccgccca

SEQ ID NO: 7464 - RNA, 20 nt, Homo sapiens
  source 1..20: mol_type = genomic RNA
gagccctgtttgccgcccag

SEQ ID NO: 7465 - RNA, 20 nt, Homo sapiens
  source 1..20: mol_type = genomic RNA
agccctgtttgccgcccagg

SEQ ID NO: 7466 - RNA, 20 nt, Homo sapiens
  source 1..20: mol_type = genomic RNA
gccctgtttgccgcccagga

SEQ ID NO: 7467 - RNA, 20 nt, Homo sapiens
  source 1..20: mol_type = genomic RNA
ccctgtttgccgcccaggag

SEQ ID NO: 7468 - RNA, 20 nt, Homo sapiens
  source 1..20: mol_type = genomic RNA
cctgtttgccgcccaggaga

SEQ ID NO: 7469 - RNA, 20 nt, Homo sapiens
  source 1..20: mol_type = genomic RNA
ctgtttgccgcccaggagaa

SEQ ID NO: 7470 - RNA, 20 nt, Homo sapiens
  source 1..20: mol_type = genomic RNA
tgtttgccgcccaggagaag

SEQ ID NO: 7471 - RNA, 20 nt, Homo sapiens
  source 1..20: mol_type = genomic RNA
gtttgccgcccaggagaagg

SEQ ID NO: 7472 - RNA, 20 nt, Homo sapiens
  source 1..20: mol_type = genomic RNA
tttgccgcccaggagaaggg

SEQ ID NO: 7473 - RNA, 20 nt, Homo sapiens
  source 1..20: mol_type = genomic RNA
ttgccgcccaggagaagggg

SEQ ID NO: 7474 - RNA, 20 nt, Homo sapiens
  source 1..20: mol_type = genomic RNA
tgccgcccaggagaaggggt

SEQ ID NO: 7475 - RNA, 20 nt, Homo sapiens
  source 1..20: mol_type = genomic RNA
gccgcccaggagaaggggtt

SEQ ID NO: 7476 - RNA, 20 nt, Homo sapiens
  source 1..20: mol_type = genomic RNA
ccgcccaggagaaggggttc

SEQ ID NO: 7477 - RNA, 20 nt, Homo sapiens
  source 1..20: mol_type = genomic RNA
cgcccaggagaaggggttcc

SEQ ID NO: 7478 - RNA, 20 nt, Homo sapiens
  source 1..20: mol_type = genomic RNA
gcccaggagaaggggttccc

SEQ ID NO: 7479 - RNA, 20 nt, Homo sapiens
  source 1..20: mol_type = genomic RNA
cccaggagaaggggttcccc

SEQ ID NO: 7480 - RNA, 20 nt, Homo sapiens
  source 1..20: mol_type = genomic RNA
ccaggagaaggggttccccg

SEQ ID NO: 7481 - RNA, 20 nt, Homo sapiens
  source 1..20: mol_type = genomic RNA
caggagaaggggttccccgg

SEQ ID NO: 7482 - RNA, 20 nt, Homo sapiens
  source 1..20: mol_type = genomic RNA
aggagaaggggttccccggg

SEQ ID NO: 7483 - RNA, 20 nt, Homo sapiens
  source 1..20: mol_type = genomic RNA
ggagaaggggttccccgggg

SEQ ID NO: 7484 - RNA, 20 nt, Homo sapiens
  source 1..20: mol_type = genomic RNA
gagaaggggttccccgggga

SEQ ID NO: 7485 - RNA, 20 nt, Homo sapiens
  source 1..20: mol_type = genomic RNA
agaaggggttccccggggac

SEQ ID NO: 7486 - RNA, 20 nt, Homo sapiens
  source 1..20: mol_type = genomic RNA
gaaggggttccccggggaca

SEQ ID NO: 7487 - RNA, 20 nt, Homo sapiens
  source 1..20: mol_type = genomic RNA
aaggggttccccggggacag

SEQ ID NO: 7488 - RNA, 20 nt, Homo sapiens
  source 1..20: mol_type = genomic RNA
aggggttccccggggacagt

SEQ ID NO: 7489 - RNA, 20 nt, Homo sapiens
  source 1..20: mol_type = genomic RNA
ggggttccccggggacagtg

SEQ ID NO: 7490 - RNA, 20 nt, Homo sapiens
  source 1..20: mol_type = genomic RNA
gggttccccggggacagtgg

SEQ ID NO: 7491 - RNA, 20 nt, Homo sapiens
  source 1..20: mol_type = genomic RNA
ggttccccggggacagtggg

SEQ ID NO: 7492 - RNA, 20 nt, Homo sapiens
  source 1..20: mol_type = genomic RNA
gttccccggggacagtgggc

SEQ ID NO: 7493 - RNA, 20 nt, Homo sapiens
  source 1..20: mol_type = genomic RNA
ttccccggggacagtgggct

SEQ ID NO: 7494 - RNA, 20 nt, Homo sapiens
  source 1..20: mol_type = genomic RNA
tccccggggacagtgggctc

SEQ ID NO: 7495 - RNA, 20 nt, Homo sapiens
  source 1..20: mol_type = genomic RNA
ccccggggacagtgggctca

SEQ ID NO: 7496 - RNA, 20 nt, Homo sapiens
  source 1..20: mol_type = genomic RNA
cccggggacagtgggctcag

SEQ ID NO: 7497 - RNA, 20 nt, Homo sapiens
  source 1..20: mol_type = genomic RNA
ccggggacagtgggctcagg

SEQ ID NO: 7498 - RNA, 20 nt, Homo sapiens
  source 1..20: mol_type = genomic RNA
cggggacagtgggctcaggg

SEQ ID NO: 7499 - RNA, 20 nt, Homo sapiens
  source 1..20: mol_type = genomic RNA
ggggacagtgggctcagggt

SEQ ID NO: 7500 - RNA, 20 nt, Homo sapiens
  source 1..20: mol_type = genomic RNA
gggacagtgggctcagggtg

SEQ ID NO: 7501 - RNA, 20 nt, Homo sapiens
  source 1..20: mol_type = genomic RNA
ggacagtgggctcagggtgt

SEQ ID NO: 7502 - RNA, 20 nt, Homo sapiens
  source 1..20: mol_type = genomic RNA
gacagtgggctcagggtgtg

SEQ ID NO: 7503 - RNA, 20 nt, Homo sapiens
  source 1..20: mol_type = genomic RNA
acagtgggctcagggtgtgc

SEQ ID NO: 7504 - RNA, 20 nt, Homo sapiens
  source 1..20: mol_type = genomic RNA
cagtgggctcagggtgtgcg

SEQ ID NO: 7505 - RNA, 20 nt, Homo sapiens
  source 1..20: mol_type = genomic RNA
agtgggctcagggtgtgcgc

SEQ ID NO: 7506 - RNA, 20 nt, Homo sapiens
  source 1..20: mol_type = genomic RNA
gtgggctcagggtgtgcgca

SEQ ID NO: 7507 - RNA, 20 nt, Homo sapiens
  source 1..20: mol_type = genomic RNA
tgggctcagggtgtgcgcag

SEQ ID NO: 7508 - RNA, 20 nt, Homo sapiens
  source 1..20: mol_type = genomic RNA
gggctcagggtgtgcgcagc

SEQ ID NO: 7509 - RNA, 20 nt, Homo sapiens
  source 1..20: mol_type = genomic RNA
ggctcagggtgtgcgcagcc

SEQ ID NO: 7510 - RNA, 20 nt, Homo sapiens
  source 1..20: mol_type = genomic RNA
gctcagggtgtgcgcagcca

SEQ ID NO: 7511 - RNA, 20 nt, Homo sapiens
  source 1..20: mol_type = genomic RNA
ctcagggtgtgcgcagccac

SEQ ID NO: 7512 - RNA, 20 nt, Homo sapiens
  source 1..20: mol_type = genomic RNA
tcagggtgtgcgcagccacc

SEQ ID NO: 7513 - RNA, 20 nt, Homo sapiens
  source 1..20: mol_type = genomic RNA
cagggtgtgcgcagccacca

SEQ ID NO: 7514 - RNA, 20 nt, Homo sapiens
  source 1..20: mol_type = genomic RNA
agggtgtgcgcagccaccat

SEQ ID NO: 7515 - RNA, 20 nt, Homo sapiens
  source 1..20: mol_type = genomic RNA
gggtgtgcgcagccaccatg

SEQ ID NO: 7516 - RNA, 20 nt, Homo sapiens
  source 1..20: mol_type = genomic RNA
ggtgtgcgcagccaccatgc

SEQ ID NO: 7517 - RNA, 20 nt, Homo sapiens
  source 1..20: mol_type = genomic RNA
gtgtgcgcagccaccatgct

SEQ ID NO: 7518 - RNA, 20 nt, Homo sapiens
  source 1..20: mol_type = genomic RNA
tgtgcgcagccaccatgctg

SEQ ID NO: 7519 - RNA, 20 nt, Homo sapiens
  source 1..20: mol_type = genomic RNA
gtgcgcagccaccatgctgt

SEQ ID NO: 7520 - RNA, 20 nt, Homo sapiens
  source 1..20: mol_type = genomic RNA
tgcgcagccaccatgctgtg

SEQ ID NO: 7521 - RNA, 20 nt, Homo sapiens
  source 1..20: mol_type = genomic RNA
gcgcagccaccatgctgtgg

SEQ ID NO: 7522 - RNA, 20 nt, Homo sapiens
  source 1..20: mol_type = genomic RNA
cgcagccaccatgctgtggt

SEQ ID NO: 7523 - RNA, 20 nt, Homo sapiens
  source 1..20: mol_type = genomic RNA
gcagccaccatgctgtggtg

SEQ ID NO: 7524 - RNA, 20 nt, Homo sapiens
  source 1..20: mol_type = genomic RNA
cagccaccatgctgtggtgt

SEQ ID NO: 7525 - RNA, 20 nt, Homo sapiens
  source 1..20: mol_type = genomic RNA
agccaccatgctgtggtgtc

SEQ ID NO: 7526 - RNA, 20 nt, Homo sapiens
  source 1..20: mol_type = genomic RNA
gccaccatgctgtggtgtca

SEQ ID NO: 7527 - RNA, 20 nt, Homo sapiens
  source 1..20: mol_type = genomic RNA
ccaccatgctgtggtgtcac

SEQ ID NO: 7528 - RNA, 20 nt, Homo sapiens
  source 1..20: mol_type = genomic RNA
caccatgctgtggtgtcacc

SEQ ID NO: 7529 - RNA, 20 nt, Homo sapiens
  source 1..20: mol_type = genomic RNA
accatgctgtggtgtcacct

SEQ ID NO: 7530 - RNA, 20 nt, Homo sapiens
  source 1..20: mol_type = genomic RNA
ccatgctgtggtgtcacctg

SEQ ID NO: 7531 - RNA, 20 nt, Homo sapiens
  source 1..20: mol_type = genomic RNA
catgctgtggtgtcacctgt

SEQ ID NO: 7532 - RNA, 20 nt, Homo sapiens
  source 1..20: mol_type = genomic RNA
atgctgtggtgtcacctgtg

SEQ ID NO: 7533 - RNA, 20 nt, Homo sapiens
  source 1..20: mol_type = genomic RNA
tgctgtggtgtcacctgtgg

SEQ ID NO: 7534 - RNA, 20 nt, Homo sapiens
  source 1..20: mol_type = genomic RNA
gctgtggtgtcacctgtgga

SEQ ID NO: 7535 - RNA, 20 nt, Homo sapiens
  source 1..20: mol_type = genomic RNA
ctgtggtgtcacctgtggac

SEQ ID NO: 7536 - RNA, 20 nt, Homo sapiens
  source 1..20: mol_type = genomic RNA
tgtggtgtcacctgtggacc

SEQ ID NO: 7537 - RNA, 20 nt, Homo sapiens
  source 1..20: mol_type = genomic RNA
gtggtgtcacctgtggaccc

SEQ ID NO: 7538 - RNA, 20 nt, Homo sapiens
  source 1..20: mol_type = genomic RNA
tggtgtcacctgtggaccca

SEQ ID NO: 7539 - RNA, 20 nt, Homo sapiens
  source 1..20: mol_type = genomic RNA
ggtgtcacctgtggacccag

SEQ ID NO: 7540 - RNA, 20 nt, Homo sapiens
  source 1..20: mol_type = genomic RNA
gtgtcacctgtggacccagg

SEQ ID NO: 7541 - RNA, 20 nt, Homo sapiens
  source 1..20: mol_type = genomic RNA
tgtcacctgtggacccaggc

SEQ ID NO: 7542 - RNA, 20 nt, Homo sapiens
  source 1..20: mol_type = genomic RNA
gtcacctgtggacccaggcg

SEQ ID NO: 7543 - RNA, 20 nt, Homo sapiens
  source 1..20: mol_type = genomic RNA
tcacctgtggacccaggcga

SEQ ID NO: 7544 - RNA, 20 nt, Homo sapiens
  source 1..20: mol_type = genomic RNA
cacctgtggacccaggcgag

SEQ ID NO: 7545 - RNA, 20 nt, Homo sapiens
  source 1..20: mol_type = genomic RNA
acctgtggacccaggcgagc

SEQ ID NO: 7546 - RNA, 20 nt, Homo sapiens
  source 1..20: mol_type = genomic RNA
cctgtggacccaggcgagct

SEQ ID NO: 7547 - RNA, 20 nt, Homo sapiens
  source 1..20: mol_type = genomic RNA
ctgtggacccaggcgagctg

SEQ ID NO: 7548 - RNA, 20 nt, Homo sapiens
  source 1..20: mol_type = genomic RNA
tgtggacccaggcgagctga

SEQ ID NO: 7549 - RNA, 20 nt, Homo sapiens
  source 1..20: mol_type = genomic RNA
gtggacccaggcgagctgat

SEQ ID NO: 7550 - RNA, 20 nt, Homo sapiens
  source 1..20: mol_type = genomic RNA
tggacccaggcgagctgatg

SEQ ID NO: 7551 - RNA, 20 nt, Homo sapiens
  source 1..20: mol_type = genomic RNA
ggacccaggcgagctgatgg

SEQ ID NO: 7552 - RNA, 20 nt, Homo sapiens
  source 1..20: mol_type = genomic RNA
gacccaggcgagctgatggc

SEQ ID NO: 7553 - RNA, 20 nt, Homo sapiens
  source 1..20: mol_type = genomic RNA
acccaggcgagctgatggcc

SEQ ID NO: 7554 - RNA, 20 nt, Homo sapiens
  source 1..20: mol_type = genomic RNA
cccaggcgagctgatggccg

SEQ ID NO: 7555 - RNA, 20 nt, Homo sapiens
  source 1..20: mol_type = genomic RNA
ccaggcgagctgatggccga

SEQ ID NO: 7556 - RNA, 20 nt, Homo sapiens
  source 1..20: mol_type = genomic RNA
caggcgagctgatggccgac

SEQ ID NO: 7557 - RNA, 20 nt, Homo sapiens
  source 1..20: mol_type = genomic RNA
aggcgagctgatggccgacc

SEQ ID NO: 7558 - RNA, 20 nt, Homo sapiens
  source 1..20: mol_type = genomic RNA
ggcgagctgatggccgaccg

SEQ ID NO: 7559 - RNA, 20 nt, Homo sapiens
  source 1..20: mol_type = genomic RNA
gcgagctgatggccgaccgc

SEQ ID NO: 7560 - RNA, 20 nt, Homo sapiens
  source 1..20: mol_type = genomic RNA
cgagctgatggccgaccgca

SEQ ID NO: 7561 - RNA, 20 nt, Homo sapiens
  source 1..20: mol_type = genomic RNA
gagctgatggccgaccgcag

SEQ ID NO: 7562 - RNA, 20 nt, Homo sapiens
  source 1..20: mol_type = genomic RNA
agctgatggccgaccgcaga

SEQ ID NO: 7563 - RNA, 20 nt, Homo sapiens
  source 1..20: mol_type = genomic RNA
gctgatggccgaccgcagaa

SEQ ID NO: 7564 - RNA, 20 nt, Homo sapiens
  source 1..20: mol_type = genomic RNA
ctgatggccgaccgcagaaa

SEQ ID NO: 7565 - RNA, 20 nt, Homo sapiens
  source 1..20: mol_type = genomic RNA
tgatggccgaccgcagaaac

SEQ ID NO: 7566 - RNA, 20 nt, Homo sapiens
  source 1..20: mol_type = genomic RNA
gatggccgaccgcagaaacg

SEQ ID NO: 7567 - RNA, 20 nt, Homo sapiens
  source 1..20: mol_type = genomic RNA
atggccgaccgcagaaacgc

SEQ ID NO: 7568 - RNA, 20 nt, Homo sapiens
  source 1..20: mol_type = genomic RNA
tggccgaccgcagaaacgca

SEQ ID NO: 7569 - RNA, 20 nt, Homo sapiens
  source 1..20: mol_type = genomic RNA
ggccgaccgcagaaacgcac

SEQ ID NO: 7570 - RNA, 20 nt, Homo sapiens
  source 1..20: mol_type = genomic RNA
gccgaccgcagaaacgcact

SEQ ID NO: 7571 - RNA, 20 nt, Homo sapiens
  source 1..20: mol_type = genomic RNA
ccgaccgcagaaacgcactt

SEQ ID NO: 7572 - RNA, 20 nt, Homo sapiens
  source 1..20: mol_type = genomic RNA
cgaccgcagaaacgcacttc

SEQ ID NO: 7573 - RNA, 20 nt, Homo sapiens
  source 1..20: mol_type = genomic RNA
gaccgcagaaacgcacttcc

SEQ ID NO: 7574 - RNA, 20 nt, Homo sapiens
  source 1..20: mol_type = genomic RNA
accgcagaaacgcacttcca

SEQ ID NO: 7575 - RNA, 20 nt, Homo sapiens
  source 1..20: mol_type = genomic RNA
ccgcagaaacgcacttccaa

SEQ ID NO: 7576 - RNA, 20 nt, Homo sapiens
  source 1..20: mol_type = genomic RNA
cgcagaaacgcacttccaag

SEQ ID NO: 7577 - RNA, 20 nt, Homo sapiens
  source 1..20: mol_type = genomic RNA
gcagaaacgcacttccaagg

SEQ ID NO: 7578 - RNA, 20 nt, Homo sapiens
  source 1..20: mol_type = genomic RNA
cagaaacgcacttccaaggc

SEQ ID NO: 7579 - RNA, 20 nt, Homo sapiens
  source 1..20: mol_type = genomic RNA
agaaacgcacttccaaggcc

SEQ ID NO: 7580 - RNA, 20 nt, Homo sapiens
  source 1..20: mol_type = genomic RNA
gaaacgcacttccaaggcca

SEQ ID NO: 7581 - RNA, 20 nt, Homo sapiens
  source 1..20: mol_type = genomic RNA
aaacgcacttccaaggccag

SEQ ID NO: 7582 - RNA, 20 nt, Homo sapiens
  source 1..20: mol_type = genomic RNA
aacgcacttccaaggccagg

SEQ ID NO: 7583 - RNA, 20 nt, Homo sapiens
  source 1..20: mol_type = genomic RNA
acgcacttccaaggccaggt

SEQ ID NO: 7584 - RNA, 20 nt, Homo sapiens
  source 1..20: mol_type = genomic RNA
cgcacttccaaggccaggtc

SEQ ID NO: 7585 - RNA, 20 nt, Homo sapiens
  source 1..20: mol_type = genomic RNA
gcacttccaaggccaggtcg

SEQ ID NO: 7586 - RNA, 20 nt, Homo sapiens
  source 1..20: mol_type = genomic RNA
cacttccaaggccaggtcgg

SEQ ID NO: 7587 - RNA, 20 nt, Homo sapiens
  source 1..20: mol_type = genomic RNA
acttccaaggccaggtcggc

SEQ ID NO: 7588 - RNA, 20 nt, Homo sapiens
  source 1..20: mol_type = genomic RNA
cttccaaggccaggtcggcc

SEQ ID NO: 7589 - RNA, 20 nt, Homo sapiens
  source 1..20: mol_type = genomic RNA
ttccaaggccaggtcggccc

SEQ ID NO: 7590 - RNA, 20 nt, Homo sapiens
  source 1..20: mol_type = genomic RNA
tccaaggccaggtcggccca

SEQ ID NO: 7591 - RNA, 20 nt, Homo sapiens
  source 1..20: mol_type = genomic RNA
ccaaggccaggtcggcccat

SEQ ID NO: 7592 - RNA, 20 nt, Homo sapiens
  source 1..20: mol_type = genomic RNA
caaggccaggtcggcccatc

SEQ ID NO: 7593 - RNA, 20 nt, Homo sapiens
  source 1..20: mol_type = genomic RNA
aaggccaggtcggcccatcc

SEQ ID NO: 7594 - RNA, 20 nt, Homo sapiens
  source 1..20: mol_type = genomic RNA
aggccaggtcggcccatcca

SEQ ID NO: 7595 - RNA, 20 nt, Homo sapiens
  source 1..20: mol_type = genomic RNA
ggccaggtcggcccatccag

SEQ ID NO: 7596 - RNA, 20 nt, Homo sapiens
  source 1..20: mol_type = genomic RNA
gccaggtcggcccatccaga

SEQ ID NO: 7597 - RNA, 20 nt, Homo sapiens
  source 1..20: mol_type = genomic RNA
ccaggtcggcccatccagat

SEQ ID NO: 7598 - RNA, 20 nt, Homo sapiens
  source 1..20: mol_type = genomic RNA
caggtcggcccatccagatg

SEQ ID NO: 7599 - RNA, 20 nt, Homo sapiens
  source 1..20: mol_type = genomic RNA
aggtcggcccatccagatga

SEQ ID NO: 7600 - RNA, 20 nt, Homo sapiens
  source 1..20: mol_type = genomic RNA
ggtcggcccatccagatgat

SEQ ID NO: 7601 - RNA, 20 nt, Homo sapiens
  source 1..20: mol_type = genomic RNA
gtcggcccatccagatgatg

SEQ ID NO: 7602 - RNA, 20 nt, Homo sapiens
  source 1..20: mol_type = genomic RNA
tcggcccatccagatgatgc

SEQ ID NO: 7603 - RNA, 20 nt, Homo sapiens
  source 1..20: mol_type = genomic RNA
cggcccatccagatgatgca

SEQ ID NO: 7604 - RNA, 20 nt, Homo sapiens
  source 1..20: mol_type = genomic RNA
ggcccatccagatgatgcag

SEQ ID NO: 7605 - RNA, 20 nt, Homo sapiens
  source 1..20: mol_type = genomic RNA
gcccatccagatgatgcagg

SEQ ID NO: 7606 - RNA, 20 nt, Homo sapiens
  source 1..20: mol_type = genomic RNA
cccatccagatgatgcagga

SEQ ID NO: 7607 - RNA, 20 nt, Homo sapiens
  source 1..20: mol_type = genomic RNA
ccatccagatgatgcaggaa

SEQ ID NO: 7608 - RNA, 20 nt, Homo sapiens
  source 1..20: mol_type = genomic RNA
catccagatgatgcaggaac

SEQ ID NO: 7609 - RNA, 20 nt, Homo sapiens
  source 1..20: mol_type = genomic RNA
atccagatgatgcaggaaca

SEQ ID NO: 7610 - RNA, 20 nt, Homo sapiens
  source 1..20: mol_type = genomic RNA
tccagatgatgcaggaacac

SEQ ID NO: 7611 - RNA, 20 nt, Homo sapiens
  source 1..20: mol_type = genomic RNA
ccagatgatgcaggaacaca

SEQ ID NO: 7612 - RNA, 20 nt, Homo sapiens
  source 1..20: mol_type = genomic RNA
cagatgatgcaggaacacag

SEQ ID NO: 7613 - RNA, 20 nt, Homo sapiens
  source 1..20: mol_type = genomic RNA
agatgatgcaggaacacagc

SEQ ID NO: 7614 - RNA, 20 nt, Homo sapiens
  source 1..20: mol_type = genomic RNA
gatgatgcaggaacacagct

SEQ ID NO: 7615 - RNA, 20 nt, Homo sapiens
  source 1..20: mol_type = genomic RNA
atgatgcaggaacacagctt

SEQ ID NO: 7616 - RNA, 20 nt, Homo sapiens
  source 1..20: mol_type = genomic RNA
tgatgcaggaacacagcttg

SEQ ID NO: 7617 - RNA, 20 nt, Homo sapiens
  source 1..20: mol_type = genomic RNA
gatgcaggaacacagcttgc

SEQ ID NO: 7618 - RNA, 20 nt, Homo sapiens
  source 1..20: mol_type = genomic RNA
atgcaggaacacagcttgct

SEQ ID NO: 7619 - RNA, 20 nt, Homo sapiens
  source 1..20: mol_type = genomic RNA
tgcaggaacacagcttgcta

SEQ ID NO: 7620 - RNA, 20 nt, Homo sapiens
  source 1..20: mol_type = genomic RNA
gcaggaacacagcttgctaa

SEQ ID NO: 7621 - RNA, 20 nt, Homo sapiens
  source 1..20: mol_type = genomic RNA
caggaacacagcttgctaaa

SEQ ID NO: 7622 - RNA, 20 nt, Homo sapiens
  source 1..20: mol_type = genomic RNA
aggaacacagcttgctaaaa

SEQ ID NO: 7623 - RNA, 20 nt, Homo sapiens
  source 1..20: mol_type = genomic RNA
ggaacacagcttgctaaaaa

SEQ ID NO: 7624 - RNA, 20 nt, Homo sapiens
  source 1..20: mol_type = genomic RNA
gaacacagcttgctaaaaac

SEQ ID NO: 7625 - RNA, 20 nt, Homo sapiens
  source 1..20: mol_type = genomic RNA
aacacagcttgctaaaaaca

SEQ ID NO: 7626 - RNA, 20 nt, Homo sapiens
  source 1..20: mol_type = genomic RNA
acacagcttgctaaaaacac

SEQ ID NO: 7627 - RNA, 20 nt, Homo sapiens
  source 1..20: mol_type = genomic RNA
cacagcttgctaaaaacacg

SEQ ID NO: 7628 - RNA, 20 nt, Homo sapiens
  source 1..20: mol_type = genomic RNA
acagcttgctaaaaacacgg

SEQ ID NO: 7629 - RNA, 20 nt, Homo sapiens
  source 1..20: mol_type = genomic RNA
cagcttgctaaaaacacggc

SEQ ID NO: 7630 - RNA, 20 nt, Homo sapiens
  source 1..20: mol_type = genomic RNA
agcttgctaaaaacacggcc

SEQ ID NO: 7631 - RNA, 20 nt, Homo sapiens
  source 1..20: mol_type = genomic RNA
gcttgctaaaaacacggccg

SEQ ID NO: 7632 - RNA, 20 nt, Homo sapiens
  source 1..20: mol_type = genomic RNA
cttgctaaaaacacggccgg

SEQ ID NO: 7633 - RNA, 20 nt, Homo sapiens
  source 1..20: mol_type = genomic RNA
ttgctaaaaacacggccggc

SEQ ID NO: 7634 - RNA, 20 nt, Homo sapiens
  source 1..20: mol_type = genomic RNA
tgctaaaaacacggccggcc

SEQ ID NO: 7635 - RNA, 20 nt, Homo sapiens
  source 1..20: mol_type = genomic RNA
gctaaaaacacggccggcct

SEQ ID NO: 7636 - RNA, 20 nt, Homo sapiens
  source 1..20: mol_type = genomic RNA
ctaaaaacacggccggcctg

SEQ ID NO: 7637 - RNA, 20 nt, Homo sapiens
  source 1..20: mol_type = genomic RNA
taaaaacacggccggcctgt

SEQ ID NO: 7638 - RNA, 20 nt, Homo sapiens
  source 1..20: mol_type = genomic RNA
aaaaacacggccggcctgtt

SEQ ID NO: 7639 - RNA, 20 nt, Homo sapiens
  source 1..20: mol_type = genomic RNA
aaaacacggccggcctgttc

SEQ ID NO: 7640 - RNA, 20 nt, Homo sapiens
  source 1..20: mol_type = genomic RNA
aaacacggccggcctgttcc

SEQ ID NO: 7641 - RNA, 20 nt, Homo sapiens
  source 1..20: mol_type = genomic RNA
aacacggccggcctgttccc

SEQ ID NO: 7642 - RNA, 20 nt, Homo sapiens
  source 1..20: mol_type = genomic RNA
acacggccggcctgttcccg

SEQ ID NO: 7643 - RNA, 20 nt, Homo sapiens
  source 1..20: mol_type = genomic RNA
cacggccggcctgttcccgt

SEQ ID NO: 7644 - RNA, 20 nt, Homo sapiens
  source 1..20: mol_type = genomic RNA
acggccggcctgttcccgtc

SEQ ID NO: 7645 - RNA, 20 nt, Homo sapiens
  source 1..20: mol_type = genomic RNA
cggccggcctgttcccgtcg

SEQ ID NO: 7646 - RNA, 20 nt, Homo sapiens
  source 1..20: mol_type = genomic RNA
ggccggcctgttcccgtcgg

SEQ ID NO: 7647 - RNA, 20 nt, Homo sapiens
  source 1..20: mol_type = genomic RNA
gccggcctgttcccgtcgga

SEQ ID NO: 7648 - RNA, 20 nt, Homo sapiens
  source 1..20: mol_type = genomic RNA
ccggcctgttcccgtcggag

SEQ ID NO: 7649 - RNA, 20 nt, Homo sapiens
  source 1..20: mol_type = genomic RNA
cggcctgttcccgtcggagc

SEQ ID NO: 7650 - RNA, 20 nt, Homo sapiens
  source 1..20: mol_type = genomic RNA
ggcctgttcccgtcggagcc

SEQ ID NO: 7651 - RNA, 20 nt, Homo sapiens
  source 1..20: mol_type = genomic RNA
gcctgttcccgtcggagcca

SEQ ID NO: 7652 - RNA, 20 nt, Homo sapiens
  source 1..20: mol_type = genomic RNA
cctgttcccgtcggagccag

SEQ ID NO: 7653 - RNA, 20 nt, Homo sapiens
  source 1..20: mol_type = genomic RNA
ctgttcccgtcggagccagt

SEQ ID NO: 7654 - RNA, 20 nt, Homo sapiens
  source 1..20: mol_type = genomic RNA
tgttcccgtcggagccagtc

SEQ ID NO: 7655 - RNA, 20 nt, Homo sapiens
  source 1..20: mol_type = genomic RNA
gttcccgtcggagccagtcg

SEQ ID NO: 7656 - RNA, 20 nt, Homo sapiens
  source 1..20: mol_type = genomic RNA
ttcccgtcggagccagtcga

SEQ ID NO: 7657 - RNA, 20 nt, Homo sapiens
  source 1..20: mol_type = genomic RNA
tcccgtcggagccagtcgaa

SEQ ID NO: 7658 - RNA, 20 nt, Homo sapiens
  source 1..20: mol_type = genomic RNA
cccgtcggagccagtcgaag

SEQ ID NO: 7659 - RNA, 20 nt, Homo sapiens
  source 1..20: mol_type = genomic RNA
ccgtcggagccagtcgaagt

SEQ ID NO: 7660 - RNA, 20 nt, Homo sapiens
  source 1..20: mol_type = genomic RNA
cgtcggagccagtcgaagtt

SEQ ID NO: 7661 - RNA, 20 nt, Homo sapiens
  source 1..20: mol_type = genomic RNA
gtcggagccagtcgaagttc

SEQ ID NO: 7662 - RNA, 20 nt, Homo sapiens
  source 1..20: mol_type = genomic RNA
tcggagccagtcgaagttcc

SEQ ID NO: 7663 - RNA, 20 nt, Homo sapiens
  source 1..20: mol_type = genomic RNA
cggagccagtcgaagttccc

SEQ ID NO: 7664 - RNA, 20 nt, Homo sapiens
  source 1..20: mol_type = genomic RNA
ggagccagtcgaagttccct

SEQ ID NO: 7665 - RNA, 20 nt, Homo sapiens
  source 1..20: mol_type = genomic RNA
gagccagtcgaagttccctg

SEQ ID NO: 7666 - RNA, 20 nt, Homo sapiens
  source 1..20: mol_type = genomic RNA
agccagtcgaagttccctga

SEQ ID NO: 7667 - RNA, 20 nt, Homo sapiens
  source 1..20: mol_type = genomic RNA
gccagtcgaagttccctgaa

SEQ ID NO: 7668 - RNA, 20 nt, Homo sapiens
  source 1..20: mol_type = genomic RNA
ccagtcgaagttccctgaac

SEQ ID NO: 7669 - RNA, 20 nt, Homo sapiens
  source 1..20: mol_type = genomic RNA
cagtcgaagttccctgaaca

SEQ ID NO: 7670 - RNA, 20 nt, Homo sapiens
  source 1..20: mol_type = genomic RNA
agtcgaagttccctgaacag

SEQ ID NO: 7671 - RNA, 20 nt, Homo sapiens
  source 1..20: mol_type = genomic RNA
gtcgaagttccctgaacagg

SEQ ID NO: 7672 - RNA, 20 nt, Homo sapiens
  source 1..20: mol_type = genomic RNA
tcgaagttccctgaacaggc

SEQ ID NO: 7673 - RNA, 20 nt, Homo sapiens
  source 1..20: mol_type = genomic RNA
cgaagttccctgaacaggcc

SEQ ID NO: 7674 - RNA, 20 nt, Homo sapiens
  source 1..20: mol_type = genomic RNA
gaagttccctgaacaggccg

SEQ ID NO: 7675 - RNA, 20 nt, Homo sapiens
  source 1..20: mol_type = genomic RNA
aagttccctgaacaggccgc

SEQ ID NO: 7676 - RNA, 20 nt, Homo sapiens
  source 1..20: mol_type = genomic RNA
agttccctgaacaggccgct

SEQ ID NO: 7677 - RNA, 20 nt, Homo sapiens
  source 1..20: mol_type = genomic RNA
gttccctgaacaggccgctg

SEQ ID NO: 7678 - RNA, 20 nt, Homo sapiens
  source 1..20: mol_type = genomic RNA
ttccctgaacaggccgctgt

SEQ ID NO: 7679 - RNA, 20 nt, Homo sapiens
  source 1..20: mol_type = genomic RNA
tccctgaacaggccgctgtt

SEQ ID NO: 7680 - RNA, 20 nt, Homo sapiens
  source 1..20: mol_type = genomic RNA
ccctgaacaggccgctgttt

SEQ ID NO: 7681 - RNA, 20 nt, Homo sapiens
  source 1..20: mol_type = genomic RNA
cctgaacaggccgctgtttc

SEQ ID NO: 7682 - RNA, 20 nt, Homo sapiens
  source 1..20: mol_type = genomic RNA
ctgaacaggccgctgtttcc

SEQ ID NO: 7683 - RNA, 20 nt, Homo sapiens
  source 1..20: mol_type = genomic RNA
tgaacaggccgctgtttccg

SEQ ID NO: 7684 - RNA, 20 nt, Homo sapiens
  source 1..20: mol_type = genomic RNA
gaacaggccgctgtttccga

SEQ ID NO: 7685 - RNA, 20 nt, Homo sapiens
  source 1..20: mol_type = genomic RNA
aacaggccgctgtttccgaa

SEQ ID NO: 7686 - RNA, 20 nt, Homo sapiens
  source 1..20: mol_type = genomic RNA
acaggccgctgtttccgaag

SEQ ID NO: 7687 - RNA, 20 nt, Homo sapiens
  source 1..20: mol_type = genomic RNA
caggccgctgtttccgaagc

SEQ ID NO: 7688 - RNA, 20 nt, Homo sapiens
  source 1..20: mol_type = genomic RNA
aggccgctgtttccgaagct

SEQ ID NO: 7689 - RNA, 20 nt, Homo sapiens
  source 1..20: mol_type = genomic RNA
ggccgctgtttccgaagctt

SEQ ID NO: 7690 - RNA, 20 nt, Homo sapiens
  source 1..20: mol_type = genomic RNA
gccgctgtttccgaagcttt

SEQ ID NO: 7691 - RNA, 20 nt, Homo sapiens
  source 1..20: mol_type = genomic RNA
ccgctgtttccgaagcttta

SEQ ID NO: 7692 - RNA, 20 nt, Homo sapiens
  source 1..20: mol_type = genomic RNA
cgctgtttccgaagctttaa

SEQ ID NO: 7693 - RNA, 20 nt, Homo sapiens
  source 1..20: mol_type = genomic RNA
gctgtttccgaagctttaaa

SEQ ID NO: 7694 - RNA, 20 nt, Homo sapiens
  source 1..20: mol_type = genomic RNA
ctgtttccgaagctttaaac

SEQ ID NO: 7695 - RNA, 20 nt, Homo sapiens
  source 1..20: mol_type = genomic RNA
tgtttccgaagctttaaacc

SEQ ID NO: 7696 - RNA, 20 nt, Homo sapiens
  source 1..20: mol_type = genomic RNA
gtttccgaagctttaaaccc

SEQ ID NO: 7697 - RNA, 20 nt, Homo sapiens
  source 1..20: mol_type = genomic RNA
tttccgaagctttaaaccct

SEQ ID NO: 7698 - RNA, 20 nt, Homo sapiens
  source 1..20: mol_type = genomic RNA
ttccgaagctttaaaccctg

SEQ ID NO: 7699 - RNA, 20 nt, Homo sapiens
  source 1..20: mol_type = genomic RNA
tccgaagctttaaaccctgt

SEQ ID NO: 7700 - RNA, 20 nt, Homo sapiens
  source 1..20: mol_type = genomic RNA
ccgaagctttaaaccctgtg

SEQ ID NO: 7701 - RNA, 20 nt, Homo sapiens
  source 1..20: mol_type = genomic RNA
cgaagctttaaaccctgtgt

SEQ ID NO: 7702 - RNA, 20 nt, Homo sapiens
  source 1..20: mol_type = genomic RNA
gaagctttaaaccctgtgtt

SEQ ID NO: 7703 - RNA, 20 nt, Homo sapiens
  source 1..20: mol_type = genomic RNA
aagctttaaaccctgtgttt

SEQ ID NO: 7704 - RNA, 20 nt, Homo sapiens
  source 1..20: mol_type = genomic RNA
agctttaaaccctgtgtttc

SEQ ID NO: 7705 - RNA, 20 nt, Homo sapiens
  source 1..20: mol_type = genomic RNA
gctttaaaccctgtgtttcc

SEQ ID NO: 7706 - RNA, 20 nt, Homo sapiens
  source 1..20: mol_type = genomic RNA
ctttaaaccctgtgtttcca

SEQ ID NO: 7707 - RNA, 20 nt, Homo sapiens
  source 1..20: mol_type = genomic RNA
tttaaaccctgtgtttccac

SEQ ID NO: 7708 - RNA, 20 nt, Homo sapiens
  source 1..20: mol_type = genomic RNA
ttaaaccctgtgtttccacc

SEQ ID NO: 7709 - RNA, 20 nt, Homo sapiens
  source 1..20: mol_type = genomic RNA
taaaccctgtgtttccacca

SEQ ID NO: 7710 - RNA, 20 nt, Homo sapiens
  source 1..20: mol_type = genomic RNA
aaaccctgtgtttccaccaa

SEQ ID NO: 7711 - RNA, 20 nt, Homo sapiens
  source 1..20: mol_type = genomic RNA
aaccctgtgtttccaccaag

SEQ ID NO: 7712 - RNA, 20 nt, Homo sapiens
  source 1..20: mol_type = genomic RNA
accctgtgtttccaccaagc

SEQ ID NO: 7713 - RNA, 20 nt, Homo sapiens
  source 1..20: mol_type = genomic RNA
ccctgtgtttccaccaagct

SEQ ID NO: 7714 - RNA, 20 nt, Homo sapiens
  source 1..20: mol_type = genomic RNA
cctgtgtttccaccaagctg

SEQ ID NO: 7715 - RNA, 20 nt, Homo sapiens
  source 1..20: mol_type = genomic RNA
ctgtgtttccaccaagctga

SEQ ID NO: 7716 - RNA, 20 nt, Homo sapiens
  source 1..20: mol_type = genomic RNA
tgtgtttccaccaagctgag

SEQ ID NO: 7717 - RNA, 20 nt, Homo sapiens
  source 1..20: mol_type = genomic RNA
gtgtttccaccaagctgagt

SEQ ID NO: 7718 - RNA, 20 nt, Homo sapiens
  source 1..20: mol_type = genomic RNA
tgtttccaccaagctgagtc

SEQ ID NO: 7719 - RNA, 20 nt, Homo sapiens
  source 1..20: mol_type = genomic RNA
gtttccaccaagctgagtcc

SEQ ID NO: 7720 - RNA, 20 nt, Homo sapiens
  source 1..20: mol_type = genomic RNA
tttccaccaagctgagtcct

SEQ ID NO: 7721 - RNA, 20 nt, Homo sapiens
  source 1..20: mol_type = genomic RNA
ttccaccaagctgagtcctg

SEQ ID NO: 7722 - RNA, 20 nt, Homo sapiens
  source 1..20: mol_type = genomic RNA
tccaccaagctgagtcctga

SEQ ID NO: 7723 - RNA, 20 nt, Homo sapiens
  source 1..20: mol_type = genomic RNA
ccaccaagctgagtcctgag

SEQ ID NO: 7724 - RNA, 20 nt, Homo sapiens
  source 1..20: mol_type = genomic RNA
caccaagctgagtcctgaga

SEQ ID NO: 7725 - RNA, 20 nt, Homo sapiens
  source 1..20: mol_type = genomic RNA
accaagctgagtcctgagaa

SEQ ID NO: 7726 - RNA, 20 nt, Homo sapiens
  source 1..20: mol_type = genomic RNA
ccaagctgagtcctgagaaa

SEQ ID NO: 7727 - RNA, 20 nt, Homo sapiens
  source 1..20: mol_type = genomic RNA
caagctgagtcctgagaaaa

SEQ ID NO: 7728 - RNA, 20 nt, Homo sapiens
  source 1..20: mol_type = genomic RNA
aagctgagtcctgagaaaac

SEQ ID NO: 7729 - RNA, 20 nt, Homo sapiens
  source 1..20: mol_type = genomic RNA
agctgagtcctgagaaaacc

SEQ ID NO: 7730 - RNA, 20 nt, Homo sapiens
  source 1..20: mol_type = genomic RNA
gctgagtcctgagaaaaccg

SEQ ID NO: 7731 - RNA, 20 nt, Homo sapiens
  source 1..20: mol_type = genomic RNA
ctgagtcctgagaaaaccga

SEQ ID NO: 7732 - RNA, 20 nt, Homo sapiens
  source 1..20: mol_type = genomic RNA
tgagtcctgagaaaaccgac

SEQ ID NO: 7733 - RNA, 20 nt, Homo sapiens
  source 1..20: mol_type = genomic RNA
gagtcctgagaaaaccgacg

SEQ ID NO: 7734 - RNA, 20 nt, Homo sapiens
  source 1..20: mol_type = genomic RNA
agtcctgagaaaaccgacgt

SEQ ID NO: 7735 - RNA, 20 nt, Homo sapiens
  source 1..20: mol_type = genomic RNA
gtcctgagaaaaccgacgtc

SEQ ID NO: 7736 - RNA, 20 nt, Homo sapiens
  source 1..20: mol_type = genomic RNA
tcctgagaaaaccgacgtct

SEQ ID NO: 7737 - RNA, 20 nt, Homo sapiens
  source 1..20: mol_type = genomic RNA
cctgagaaaaccgacgtctg

SEQ ID NO: 7738 - RNA, 20 nt, Homo sapiens
  source 1..20: mol_type = genomic RNA
ctgagaaaaccgacgtctgc

SEQ ID NO: 7739 - RNA, 20 nt, Homo sapiens
  source 1..20: mol_type = genomic RNA
tgagaaaaccgacgtctgcc

SEQ ID NO: 7740 - RNA, 20 nt, Homo sapiens
  source 1..20: mol_type = genomic RNA
gagaaaaccgacgtctgcct

SEQ ID NO: 7741 - RNA, 20 nt, Homo sapiens
  source 1..20: mol_type = genomic RNA
agaaaaccgacgtctgcctg

SEQ ID NO: 7742 - RNA, 20 nt, Homo sapiens
  source 1..20: mol_type = genomic RNA
gaaaaccgacgtctgcctgc

SEQ ID NO: 7743 - RNA, 20 nt, Homo sapiens
  source 1..20: mol_type = genomic RNA
aaaaccgacgtctgcctgca

SEQ ID NO: 7744 - RNA, 20 nt, Homo sapiens
  source 1..20: mol_type = genomic RNA
aaaccgacgtctgcctgcag

SEQ ID NO: 7745 - RNA, 20 nt, Homo sapiens
  source 1..20: mol_type = genomic RNA
aaccgacgtctgcctgcaga

SEQ ID NO: 7746 - RNA, 20 nt, Homo sapiens
  source 1..20: mol_type = genomic RNA
accgacgtctgcctgcagaa

SEQ ID NO: 7747 - RNA, 20 nt, Homo sapiens
  source 1..20: mol_type = genomic RNA
ccgacgtctgcctgcagaag

SEQ ID NO: 7748 - RNA, 20 nt, Homo sapiens
  source 1..20: mol_type = genomic RNA
cgacgtctgcctgcagaagg

SEQ ID NO: 7749 - RNA, 20 nt, Homo sapiens
  source 1..20: mol_type = genomic RNA
gacgtctgcctgcagaaggg

SEQ ID NO: 7750 - RNA, 20 nt, Homo sapiens
  source 1..20: mol_type = genomic RNA
acgtctgcctgcagaaggga

SEQ ID NO: 7751 - RNA, 20 nt, Homo sapiens
  source 1..20: mol_type = genomic RNA
cgtctgcctgcagaagggaa

SEQ ID NO: 7752 - RNA, 20 nt, Homo sapiens
  source 1..20: mol_type = genomic RNA
gtctgcctgcagaagggaaa

SEQ ID NO: 7753 - RNA, 20 nt, Homo sapiens
  source 1..20: mol_type = genomic RNA
tctgcctgcagaagggaaag

SEQ ID NO: 7754 - RNA, 20 nt, Homo sapiens
  source 1..20: mol_type = genomic RNA
ctgcctgcagaagggaaagg

SEQ ID NO: 7755 - RNA, 20 nt, Homo sapiens
  source 1..20: mol_type = genomic RNA
tgcctgcagaagggaaaggg

SEQ ID NO: 7756 - RNA, 20 nt, Homo sapiens
  source 1..20: mol_type = genomic RNA
gcctgcagaagggaaagggg

SEQ ID NO: 7757 - RNA, 20 nt, Homo sapiens
  source 1..20: mol_type = genomic RNA
cctgcagaagggaaaggggt

SEQ ID NO: 7758 - RNA, 20 nt, Homo sapiens
  source 1..20: mol_type = genomic RNA
ctgcagaagggaaaggggtg

SEQ ID NO: 7759 - RNA, 20 nt, Homo sapiens
  source 1..20: mol_type = genomic RNA
tgcagaagggaaaggggtgc

SEQ ID NO: 7760 - RNA, 20 nt, Homo sapiens
  source 1..20: mol_type = genomic RNA
gcagaagggaaaggggtgct

SEQ ID NO: 7761 - RNA, 20 nt, Homo sapiens
  source 1..20: mol_type = genomic RNA
cagaagggaaaggggtgctt

SEQ ID NO: 7762 - RNA, 20 nt, Homo sapiens
  source 1..20: mol_type = genomic RNA
agaagggaaaggggtgcttc

SEQ ID NO: 7763 - RNA, 20 nt, Homo sapiens
  source 1..20: mol_type = genomic RNA
gaagggaaaggggtgcttca

SEQ ID NO: 7764 - RNA, 20 nt, Homo sapiens
  source 1..20: mol_type = genomic RNA
aagggaaaggggtgcttcat

SEQ ID NO: 7765 - RNA, 20 nt, Homo sapiens
  source 1..20: mol_type = genomic RNA
agggaaaggggtgcttcatg

SEQ ID NO: 7766 - RNA, 20 nt, Homo sapiens
  source 1..20: mol_type = genomic RNA
gggaaaggggtgcttcatgt

SEQ ID NO: 7767 - RNA, 20 nt, Homo sapiens
  source 1..20: mol_type = genomic RNA
ggaaaggggtgcttcatgtt

SEQ ID NO: 7768 - RNA, 20 nt, Homo sapiens
  source 1..20: mol_type = genomic RNA
gaaaggggtgcttcatgttc

SEQ ID NO: 7769 - RNA, 20 nt, Homo sapiens
  source 1..20: mol_type = genomic RNA
aaaggggtgcttcatgttcc

SEQ ID NO: 7770 - RNA, 20 nt, Homo sapiens
  source 1..20: mol_type = genomic RNA
aaggggtgcttcatgttcct

SEQ ID NO: 7771 - RNA, 20 nt, Homo sapiens
  source 1..20: mol_type = genomic RNA
aggggtgcttcatgttcctc

SEQ ID NO: 7772 - RNA, 20 nt, Homo sapiens
  source 1..20: mol_type = genomic RNA
ggggtgcttcatgttcctct

SEQ ID NO: 7773 - RNA, 20 nt, Homo sapiens
  source 1..20: mol_type = genomic RNA
gggtgcttcatgttcctctc

SEQ ID NO: 7774 - RNA, 20 nt, Homo sapiens
  source 1..20: mol_type = genomic RNA
ggtgcttcatgttcctctct

SEQ ID NO: 7775 - RNA, 20 nt, Homo sapiens
  source 1..20: mol_type = genomic RNA
gtgcttcatgttcctctctc

SEQ ID NO: 7776 - RNA, 20 nt, Homo sapiens
  source 1..20: mol_type = genomic RNA
tgcttcatgttcctctctct

SEQ ID NO: 7777 - RNA, 20 nt, Homo sapiens
  source 1..20: mol_type = genomic RNA
gcttcatgttcctctctctc

SEQ ID NO: 7778 - RNA, 20 nt, Homo sapiens
  source 1..20: mol_type = genomic RNA
cttcatgttcctctctctcc

SEQ ID NO: 7779 - RNA, 20 nt, Homo sapiens
  source 1..20: mol_type = genomic RNA
ttcatgttcctctctctcct

SEQ ID NO: 7780 - RNA, 20 nt, Homo sapiens
  source 1..20: mol_type = genomic RNA
tcatgttcctctctctcctt

SEQ ID NO: 7781 - RNA, 20 nt, Homo sapiens
  source 1..20: mol_type = genomic RNA
catgttcctctctctccttc

SEQ ID NO: 7782 - RNA, 20 nt, Homo sapiens
  source 1..20: mol_type = genomic RNA
atgttcctctctctccttca

SEQ ID NO: 7783 - RNA, 20 nt, Homo sapiens
  source 1..20: mol_type = genomic RNA
tgttcctctctctccttcat

SEQ ID NO: 7784 - RNA, 20 nt, Homo sapiens
  source 1..20: mol_type = genomic RNA
gttcctctctctccttcatc

SEQ ID NO: 7785 - RNA, 20 nt, Homo sapiens
  source 1..20: mol_type = genomic RNA
ttcctctctctccttcatct

SEQ ID NO: 7786 - RNA, 20 nt, Homo sapiens
  source 1..20: mol_type = genomic RNA
tcctctctctccttcatctc

SEQ ID NO: 7787 - RNA, 20 nt, Homo sapiens
  source 1..20: mol_type = genomic RNA
cctctctctccttcatctcc

SEQ ID NO: 7788 - RNA, 20 nt, Homo sapiens
  source 1..20: mol_type = genomic RNA
ctctctctccttcatctccc

SEQ ID NO: 7789 - RNA, 20 nt, Homo sapiens
  source 1..20: mol_type = genomic RNA
tctctctccttcatctccct

SEQ ID NO: 7790 - RNA, 20 nt, Homo sapiens
  source 1..20: mol_type = genomic RNA
ggccctgggacctttgccta

SEQ ID NO: 7791 - RNA, 20 nt, Homo sapiens
  source 1..20: mol_type = genomic RNA
gccctgggacctttgcctat

SEQ ID NO: 7792 - RNA, 20 nt, Homo sapiens
  source 1..20: mol_type = genomic RNA
ccctgggacctttgcctatt

SEQ ID NO: 7793 - RNA, 20 nt, Homo sapiens
  source 1..20: mol_type = genomic RNA
cctgggacctttgcctattt

SEQ ID NO: 7794 - RNA, 20 nt, Homo sapiens
  source 1..20: mol_type = genomic RNA
ctgggacctttgcctatttt

SEQ ID NO: 7795 - RNA, 20 nt, Homo sapiens
  source 1..20: mol_type = genomic RNA
tgggacctttgcctattttc

SEQ ID NO: 7796 - RNA, 20 nt, Homo sapiens
  source 1..20: mol_type = genomic RNA
gggacctttgcctattttct

SEQ ID NO: 7797 - RNA, 20 nt, Homo sapiens
  source 1..20: mol_type = genomic RNA
ggacctttgcctattttctg

SEQ ID NO: 7798 - RNA, 20 nt, Homo sapiens
  source 1..20: mol_type = genomic RNA
gacctttgcctattttctga

SEQ ID NO: 7799 - RNA, 20 nt, Homo sapiens
  source 1..20: mol_type = genomic RNA
acctttgcctattttctgat

SEQ ID NO: 7800 - RNA, 20 nt, Homo sapiens
  source 1..20: mol_type = genomic RNA
cctttgcctattttctgatt

SEQ ID NO: 7801 - RNA, 20 nt, Homo sapiens
  source 1..20: mol_type = genomic RNA
ctttgcctattttctgattg

SEQ ID NO: 7802 - RNA, 20 nt, Homo sapiens
  source 1..20: mol_type = genomic RNA
tttgcctattttctgattga

SEQ ID NO: 7803 - RNA, 20 nt, Homo sapiens
  source 1..20: mol_type = genomic RNA
ttgcctattttctgattgat

SEQ ID NO: 7804 - RNA, 20 nt, Homo sapiens
  source 1..20: mol_type = genomic RNA
tgcctattttctgattgata

SEQ ID NO: 7805 - RNA, 20 nt, Homo sapiens
  source 1..20: mol_type = genomic RNA
gcctattttctgattgatag

SEQ ID NO: 7806 - RNA, 20 nt, Homo sapiens
  source 1..20: mol_type = genomic RNA
cctattttctgattgatagg

SEQ ID NO: 7807 - RNA, 20 nt, Homo sapiens
  source 1..20: mol_type = genomic RNA
ctattttctgattgataggc

SEQ ID NO: 7808 - RNA, 20 nt, Homo sapiens
  source 1..20: mol_type = genomic RNA
tattttctgattgataggct

SEQ ID NO: 7809 - RNA, 20 nt, Homo sapiens
  source 1..20: mol_type = genomic RNA
attttctgattgataggctt

SEQ ID NO: 7810 - RNA, 20 nt, Homo sapiens
  source 1..20: mol_type = genomic RNA
ttttctgattgataggcttt

SEQ ID NO: 7811 - RNA, 20 nt, Homo sapiens
  source 1..20: mol_type = genomic RNA
tttctgattgataggctttg

SEQ ID NO: 7812 - RNA, 20 nt, Homo sapiens
  source 1..20: mol_type = genomic RNA
ttctgattgataggctttgt

SEQ ID NO: 7813 - RNA, 20 nt, Homo sapiens
  source 1..20: mol_type = genomic RNA
tctgattgataggctttgtt

SEQ ID NO: 7814 - RNA, 20 nt, Homo sapiens
  source 1..20: mol_type = genomic RNA
ctgattgataggctttgttt

SEQ ID NO: 7815 - RNA, 20 nt, Homo sapiens
  source 1..20: mol_type = genomic RNA
tgattgataggctttgtttt

SEQ ID NO: 7816 - RNA, 20 nt, Homo sapiens
  source 1..20: mol_type = genomic RNA
gattgataggctttgttttg

SEQ ID NO: 7817 - RNA, 20 nt, Homo sapiens
  source 1..20: mol_type = genomic RNA
attgataggctttgttttgt

SEQ ID NO: 7818 - RNA, 20 nt, Homo sapiens
  source 1..20: mol_type = genomic RNA
ttgataggctttgttttgtc

SEQ ID NO: 7819 - RNA, 20 nt, Homo sapiens
  source 1..20: mol_type = genomic RNA
tgataggctttgttttgtct

SEQ ID NO: 7820 - RNA, 20 nt, Homo sapiens
  source 1..20: mol_type = genomic RNA
gataggctttgttttgtctt

SEQ ID NO: 7821 - RNA, 20 nt, Homo sapiens
  source 1..20: mol_type = genomic RNA
ataggctttgttttgtcttt

SEQ ID NO: 7822 - RNA, 20 nt, Homo sapiens
  source 1..20: mol_type = genomic RNA
taggctttgttttgtcttta

SEQ ID NO: 7823 - RNA, 20 nt, Homo sapiens
  source 1..20: mol_type = genomic RNA
aggctttgttttgtctttac

SEQ ID NO: 7824 - RNA, 20 nt, Homo sapiens
  source 1..20: mol_type = genomic RNA
ggctttgttttgtctttacc

SEQ ID NO: 7825 - RNA, 20 nt, Homo sapiens
  source 1..20: mol_type = genomic RNA
gctttgttttgtctttacct

SEQ ID NO: 7826 - RNA, 20 nt, Homo sapiens
  source 1..20: mol_type = genomic RNA
ctttgttttgtctttacctc

SEQ ID NO: 7827 - RNA, 20 nt, Homo sapiens
  source 1..20: mol_type = genomic RNA
tttgttttgtctttacctcc

SEQ ID NO: 7828 - RNA, 20 nt, Homo sapiens
  source 1..20: mol_type = genomic RNA
ttgttttgtctttacctcct

SEQ ID NO: 7829 - RNA, 20 nt, Homo sapiens
  source 1..20: mol_type = genomic RNA
tgttttgtctttacctcctt

SEQ ID NO: 7830 - RNA, 20 nt, Homo sapiens
  source 1..20: mol_type = genomic RNA
gttttgtctttacctccttc

SEQ ID NO: 7831 - RNA, 20 nt, Homo sapiens
  source 1..20: mol_type = genomic RNA
ttttgtctttacctccttct

SEQ ID NO: 7832 - RNA, 20 nt, Homo sapiens
  source 1..20: mol_type = genomic RNA
tttgtctttacctccttctt

SEQ ID NO: 7833 - RNA, 20 nt, Homo sapiens
  source 1..20: mol_type = genomic RNA
ttgtctttacctccttcttt

SEQ ID NO: 7834 - RNA, 20 nt, Homo sapiens
  source 1..20: mol_type = genomic RNA
tgtctttacctccttctttc

SEQ ID NO: 7835 - RNA, 20 nt, Homo sapiens
  source 1..20: mol_type = genomic RNA
gtctttacctccttctttct

SEQ ID NO: 7836 - RNA, 20 nt, Homo sapiens
  source 1..20: mol_type = genomic RNA
tctttacctccttctttctg

SEQ ID NO: 7837 - RNA, 20 nt, Homo sapiens
  source 1..20: mol_type = genomic RNA
ctttacctccttctttctgg

SEQ ID NO: 7838 - RNA, 20 nt, Homo sapiens
  source 1..20: mol_type = genomic RNA
tttacctccttctttctggg

SEQ ID NO: 7839 - RNA, 20 nt, Homo sapiens
  source 1..20: mol_type = genomic RNA
ttacctccttctttctgggg

SEQ ID NO: 7840 - RNA, 20 nt, Homo sapiens
  source 1..20: mol_type = genomic RNA
tacctccttctttctgggga

SEQ ID NO: 7841 - RNA, 20 nt, Homo sapiens
  source 1..20: mol_type = genomic RNA
acctccttctttctggggaa

SEQ ID NO: 7842 - RNA, 20 nt, Homo sapiens
  source 1..20: mol_type = genomic RNA
cctccttctttctggggaaa

SEQ ID NO: 7843 - RNA, 20 nt, Homo sapiens
  source 1..20: mol_type = genomic RNA
ctccttctttctggggaaaa

SEQ ID NO: 7844 - RNA, 20 nt, Homo sapiens
  source 1..20: mol_type = genomic RNA
tccttctttctggggaaaac

SEQ ID NO: 7845 - RNA, 20 nt, Homo sapiens
  source 1..20: mol_type = genomic RNA
ccttctttctggggaaaact

SEQ ID NO: 7846 - RNA, 20 nt, Homo sapiens
  source 1..20: mol_type = genomic RNA
cttctttctggggaaaactt

SEQ ID NO: 7847 - RNA, 20 nt, Homo sapiens
  source 1..20: mol_type = genomic RNA
ttctttctggggaaaacttc

SEQ ID NO: 7848 - RNA, 20 nt, Homo sapiens
  source 1..20: mol_type = genomic RNA
tctttctggggaaaacttca

SEQ ID NO: 7849 - RNA, 20 nt, Homo sapiens
  source 1..20: mol_type = genomic RNA
ctttctggggaaaacttcag

SEQ ID NO: 7850 - RNA, 20 nt, Homo sapiens
  source 1..20: mol_type = genomic RNA
tttctggggaaaacttcagt

SEQ ID NO: 7851 - RNA, 20 nt, Homo sapiens
  source 1..20: mol_type = genomic RNA
ttctggggaaaacttcagtt

SEQ ID NO: 7852 - RNA, 20 nt, Homo sapiens
  source 1..20: mol_type = genomic RNA
tctggggaaaacttcagttt

SEQ ID NO: 7853 - RNA, 20 nt, Homo sapiens
  source 1..20: mol_type = genomic RNA
ctggggaaaacttcagtttt

SEQ ID NO: 7854 - RNA, 20 nt, Homo sapiens
  source 1..20: mol_type = genomic RNA
tggggaaaacttcagtttta

SEQ ID NO: 7855 - RNA, 20 nt, Homo sapiens
  source 1..20: mol_type = genomic RNA
ggggaaaacttcagttttat

SEQ ID NO: 7856 - RNA, 20 nt, Homo sapiens
  source 1..20: mol_type = genomic RNA
gggaaaacttcagttttatc

SEQ ID NO: 7857 - RNA, 20 nt, Homo sapiens
  source 1..20: mol_type = genomic RNA
ggaaaacttcagttttatcg

SEQ ID NO: 7858 - RNA, 20 nt, Homo sapiens
  source 1..20: mol_type = genomic RNA
gaaaacttcagttttatcgc

SEQ ID NO: 7859 - RNA, 20 nt, Homo sapiens
  source 1..20: mol_type = genomic RNA
aaaacttcagttttatcgca

SEQ ID NO: 7860 - RNA, 20 nt, Homo sapiens
  source 1..20: mol_type = genomic RNA
aaacttcagttttatcgcac

SEQ ID NO: 7861 - RNA, 20 nt, Homo sapiens
  source 1..20: mol_type = genomic RNA
aacttcagttttatcgcacg

SEQ ID NO: 7862 - RNA, 20 nt, Homo sapiens
  source 1..20: mol_type = genomic RNA
acttcagttttatcgcacgt

SEQ ID NO: 7863 - RNA, 20 nt, Homo sapiens
  source 1..20: mol_type = genomic RNA
cttcagttttatcgcacgtt

SEQ ID NO: 7864 - RNA, 20 nt, Homo sapiens
  source 1..20: mol_type = genomic RNA
ttcagttttatcgcacgttc

SEQ ID NO: 7865 - RNA, 20 nt, Homo sapiens
  source 1..20: mol_type = genomic RNA
tcagttttatcgcacgttcc

SEQ ID NO: 7866 - RNA, 20 nt, Homo sapiens
  source 1..20: mol_type = genomic RNA
cagttttatcgcacgttccc

SEQ ID NO: 7867 - RNA, 20 nt, Homo sapiens
  source 1..20: mol_type = genomic RNA
agttttatcgcacgttcccc

SEQ ID NO: 7868 - RNA, 20 nt, Homo sapiens
  source 1..20: mol_type = genomic RNA
gttttatcgcacgttcccct

SEQ ID NO: 7869 - RNA, 20 nt, Homo sapiens
  source 1..20: mol_type = genomic RNA
ttttatcgcacgttcccctt

SEQ ID NO: 7870 - RNA, 20 nt, Homo sapiens
  source 1..20: mol_type = genomic RNA
tttatcgcacgttccccttt

SEQ ID NO: 7871 - RNA, 20 nt, Homo sapiens
  source 1..20: mol_type = genomic RNA
ttatcgcacgttcccctttt

SEQ ID NO: 7872 - RNA, 20 nt, Homo sapiens
  source 1..20: mol_type = genomic RNA
tatcgcacgttccccttttc

SEQ ID NO: 7873 - RNA, 20 nt, Homo sapiens
  source 1..20: mol_type = genomic RNA
atcgcacgttccccttttcc

SEQ ID NO: 7874 - RNA, 20 nt, Homo sapiens
  source 1..20: mol_type = genomic RNA
tcgcacgttccccttttcca

SEQ ID NO: 7875 - RNA, 20 nt, Homo sapiens
  source 1..20: mol_type = genomic RNA
cgcacgttccccttttccat

SEQ ID NO: 7876 - RNA, 20 nt, Homo sapiens
  source 1..20: mol_type = genomic RNA
gcacgttccccttttccata

SEQ ID NO: 7877 - RNA, 20 nt, Homo sapiens
  source 1..20: mol_type = genomic RNA
cacgttccccttttccatat

SEQ ID NO: 7878 - RNA, 20 nt, Homo sapiens
  source 1..20: mol_type = genomic RNA
acgttccccttttccatatc

SEQ ID NO: 7879 - RNA, 20 nt, Homo sapiens
  source 1..20: mol_type = genomic RNA
cgttccccttttccatatct

SEQ ID NO: 7880 - RNA, 20 nt, Homo sapiens
  source 1..20: mol_type = genomic RNA
gttccccttttccatatctt

SEQ ID NO: 7881 - RNA, 20 nt, Homo sapiens
  source 1..20: mol_type = genomic RNA
ttccccttttccatatcttc

SEQ ID NO: 7882 - RNA, 20 nt, Homo sapiens
  source 1..20: mol_type = genomic RNA
tccccttttccatatcttca

SEQ ID NO: 7883 - RNA, 20 nt, Homo sapiens
  source 1..20: mol_type = genomic RNA
ccccttttccatatcttcat

SEQ ID NO: 7884 - RNA, 20 nt, Homo sapiens
  source 1..20: mol_type = genomic RNA
cccttttccatatcttcatc

SEQ ID NO: 7885 - RNA, 20 nt, Homo sapiens
  source 1..20: mol_type = genomic RNA
ccttttccatatcttcatct

SEQ ID NO: 7886 - RNA, 20 nt, Homo sapiens
  source 1..20: mol_type = genomic RNA
cttttccatatcttcatctt

SEQ ID NO: 7887 - RNA, 20 nt, Homo sapiens
  source 1..20: mol_type = genomic RNA
ttttccatatcttcatcttc

SEQ ID NO: 7888 - RNA, 20 nt, Homo sapiens
  source 1..20: mol_type = genomic RNA
tttccatatcttcatcttcc

SEQ ID NO: 7889 - RNA, 20 nt, Homo sapiens
  source 1..20: mol_type = genomic RNA
ttccatatcttcatcttccc

SEQ ID NO: 7890 - RNA, 20 nt, Homo sapiens
  source 1..20: mol_type = genomic RNA
tccatatcttcatcttccct

SEQ ID NO: 7891 - RNA, 20 nt, Homo sapiens
  source 1..20: mol_type = genomic RNA
ccatatcttcatcttccctc

SEQ ID NO: 7892 - RNA, 20 nt, Homo sapiens
  source 1..20: mol_type = genomic RNA
catatcttcatcttccctct

SEQ ID NO: 7893 - RNA, 20 nt, Homo sapiens
  source 1..20: mol_type = genomic RNA
atatcttcatcttccctcta

SEQ ID NO: 7894 - RNA, 20 nt, Homo sapiens
  source 1..20: mol_type = genomic RNA
tatcttcatcttccctctac

SEQ ID NO: 7895 - RNA, 20 nt, Homo sapiens
  source 1..20: mol_type = genomic RNA
atcttcatcttccctctacc

SEQ ID NO: 7896 - RNA, 20 nt, Homo sapiens
  source 1..20: mol_type = genomic RNA
tcttcatcttccctctaccc

SEQ ID NO: 7897 - RNA, 20 nt, Homo sapiens
  source 1..20: mol_type = genomic RNA
cttcatcttccctctaccca

SEQ ID NO: 7898 - RNA, 20 nt, Homo sapiens
  source 1..20: mol_type = genomic RNA
ttcatcttccctctacccag

SEQ ID NO: 7899 - RNA, 20 nt, Homo sapiens
  source 1..20: mol_type = genomic RNA
tcatcttccctctacccaga

SEQ ID NO: 7900 - RNA, 20 nt, Homo sapiens
  source 1..20: mol_type = genomic RNA
catcttccctctacccagat

SEQ ID NO: 7901 - RNA, 20 nt, Homo sapiens
  source 1..20: mol_type = genomic RNA
atcttccctctacccagatt

SEQ ID NO: 7902 - RNA, 20 nt, Homo sapiens
  source 1..20: mol_type = genomic RNA
tcttccctctacccagattg

SEQ ID NO: 7903 - RNA, 20 nt, Homo sapiens
  source 1..20: mol_type = genomic RNA
cttccctctacccagattgt

SEQ ID NO: 7904 - RNA, 20 nt, Homo sapiens
  source 1..20: mol_type = genomic RNA
ttccctctacccagattgtg

SEQ ID NO: 7905 - RNA, 20 nt, Homo sapiens
  source 1..20: mol_type = genomic RNA
tccctctacccagattgtga

SEQ ID NO: 7906 - RNA, 20 nt, Homo sapiens
  source 1..20: mol_type = genomic RNA
ccctctacccagattgtgaa

SEQ ID NO: 7907 - RNA, 20 nt, Homo sapiens
  source 1..20: mol_type = genomic RNA
cctctacccagattgtgaag

SEQ ID NO: 7908 - RNA, 20 nt, Homo sapiens
  source 1..20: mol_type = genomic RNA
ctctacccagattgtgaaga

SEQ ID NO: 7909 - RNA, 20 nt, Homo sapiens
  source 1..20: mol_type = genomic RNA
tctacccagattgtgaagat

SEQ ID NO: 7910 - RNA, 20 nt, Homo sapiens
  source 1..20: mol_type = genomic RNA
ctacccagattgtgaagatg

SEQ ID NO: 7911 - RNA, 20 nt, Homo sapiens
  source 1..20: mol_type = genomic RNA
tacccagattgtgaagatgg

SEQ ID NO: 7912 - RNA, 20 nt, Homo sapiens
  source 1..20: mol_type = genomic RNA
acccagattgtgaagatgga

SEQ ID NO: 7913 - RNA, 20 nt, Homo sapiens
  source 1..20: mol_type = genomic RNA
cccagattgtgaagatggaa

SEQ ID NO: 7914 - RNA, 20 nt, Homo sapiens
  source 1..20: mol_type = genomic RNA
ccagattgtgaagatggaaa

SEQ ID NO: 7915 - RNA, 20 nt, Homo sapiens
  source 1..20: mol_type = genomic RNA
cagattgtgaagatggaaag

SEQ ID NO: 7916 - RNA, 20 nt, Homo sapiens
  source 1..20: mol_type = genomic RNA
agattgtgaagatggaaagg

SEQ ID NO: 7917 - RNA, 20 nt, Homo sapiens
  source 1..20: mol_type = genomic RNA
gattgtgaagatggaaaggg

SEQ ID NO: 7918 - RNA, 20 nt, Homo sapiens
  source 1..20: mol_type = genomic RNA
attgtgaagatggaaagggt

SEQ ID NO: 7919 - RNA, 20 nt, Homo sapiens
  source 1..20: mol_type = genomic RNA
ttgtgaagatggaaagggtc

SEQ ID NO: 7920 - RNA, 20 nt, Homo sapiens
  source 1..20: mol_type = genomic RNA
tgtgaagatggaaagggtcc

SEQ ID NO: 7921 - RNA, 20 nt, Homo sapiens
  source 1..20: mol_type = genomic RNA
gtgaagatggaaagggtcca

SEQ ID NO: 7922 - RNA, 20 nt, Homo sapiens
  source 1..20: mol_type = genomic RNA
tgaagatggaaagggtccaa

SEQ ID NO: 7923 - RNA, 20 nt, Homo sapiens
  source 1..20: mol_type = genomic RNA
gaagatggaaagggtccaac

SEQ ID NO: 7924 - RNA, 20 nt, Homo sapiens
  source 1..20: mol_type = genomic RNA
aagatggaaagggtccaacc

SEQ ID NO: 7925 - RNA, 20 nt, Homo sapiens
  source 1..20: mol_type = genomic RNA
agatggaaagggtccaaccc

SEQ ID NO: 7926 - RNA, 20 nt, Homo sapiens
  source 1..20: mol_type = genomic RNA
gatggaaagggtccaacccc

SEQ ID NO: 7927 - RNA, 20 nt, Homo sapiens
  source 1..20: mol_type = genomic RNA
atggaaagggtccaacccct

SEQ ID NO: 7928 - RNA, 20 nt, Homo sapiens
  source 1..20: mol_type = genomic RNA
tggaaagggtccaacccctg

SEQ ID NO: 7929 - RNA, 20 nt, Homo sapiens
  source 1..20: mol_type = genomic RNA
ggaaagggtccaacccctgg

SEQ ID NO: 7930 - RNA, 20 nt, Homo sapiens
  source 1..20: mol_type = genomic RNA
gaaagggtccaacccctgga

SEQ ID NO: 7931 - RNA, 20 nt, Homo sapiens
  source 1..20: mol_type = genomic RNA
aaagggtccaacccctggaa

SEQ ID NO: 7932 - RNA, 20 nt, Homo sapiens
  source 1..20: mol_type = genomic RNA
aagggtccaacccctggaag

SEQ ID NO: 7933 - RNA, 20 nt, Homo sapiens
  source 1..20: mol_type = genomic RNA
agggtccaacccctggaaga

SEQ ID NO: 7934 - RNA, 20 nt, Homo sapiens
  source 1..20: mol_type = genomic RNA
gggtccaacccctggaagag

SEQ ID NO: 7935 - RNA, 20 nt, Homo sapiens
  source 1..20: mol_type = genomic RNA
ggtccaacccctggaagaga

SEQ ID NO: 7936 - RNA, 20 nt, Homo sapiens
  source 1..20: mol_type = genomic RNA
gtccaacccctggaagagaa

SEQ ID NO: 7937 - RNA, 20 nt, Homo sapiens
  source 1..20: mol_type = genomic RNA
tccaacccctggaagagaat

SEQ ID NO: 7938 - RNA, 20 nt, Homo sapiens
  source 1..20: mol_type = genomic RNA
ccaacccctggaagagaatg

SEQ ID NO: 7939 - RNA, 20 nt, Homo sapiens
  source 1..20: mol_type = genomic RNA
caacccctggaagagaatgt

SEQ ID NO: 7940 - RNA, 20 nt, Homo sapiens
  source 1..20: mol_type = genomic RNA
aacccctggaagagaatgtg

SEQ ID NO: 7941 - RNA, 20 nt, Homo sapiens
  source 1..20: mol_type = genomic RNA
acccctggaagagaatgtgg

SEQ ID NO: 7942 - RNA, 20 nt, Homo sapiens
  source 1..20: mol_type = genomic RNA
cccctggaagagaatgtggg

SEQ ID NO: 7943 - RNA, 20 nt, Homo sapiens
  source 1..20: mol_type = genomic RNA
ccctggaagagaatgtggga

SEQ ID NO: 7944 - RNA, 20 nt, Homo sapiens
  source 1..20: mol_type = genomic RNA
cctggaagagaatgtgggaa

SEQ ID NO: 7945 - RNA, 20 nt, Homo sapiens
  source 1..20: mol_type = genomic RNA
ctggaagagaatgtgggaaa

SEQ ID NO: 7946 - RNA, 20 nt, Homo sapiens
  source 1..20: mol_type = genomic RNA
tggaagagaatgtgggaaat

SEQ ID NO: 7947 - RNA, 20 nt, Homo sapiens
  source 1..20: mol_type = genomic RNA
ggaagagaatgtgggaaatg

SEQ ID NO: 7948 - RNA, 20 nt, Homo sapiens
  source 1..20: mol_type = genomic RNA
gaagagaatgtgggaaatgc

SEQ ID NO: 7949 - RNA, 20 nt, Homo sapiens
  source 1..20: mol_type = genomic RNA
aagagaatgtgggaaatgca

SEQ ID NO: 7950 - RNA, 20 nt, Homo sapiens
  source 1..20: mol_type = genomic RNA
agagaatgtgggaaatgcag

SEQ ID NO: 7951 - RNA, 20 nt, Homo sapiens
  source 1..20: mol_type = genomic RNA
gagaatgtgggaaatgcagc

SEQ ID NO: 7952 - RNA, 20 nt, Homo sapiens
  source 1..20: mol_type = genomic RNA
agaatgtgggaaatgcagcc

SEQ ID NO: 7953 - RNA, 20 nt, Homo sapiens
  source 1..20: mol_type = genomic RNA
gaatgtgggaaatgcagcca

SEQ ID NO: 7954 - RNA, 20 nt, Homo sapiens
  source 1..20: mol_type = genomic RNA
aatgtgggaaatgcagccag

SEQ ID NO: 7955 - RNA, 20 nt, Homo sapiens
  source 1..20: mol_type = genomic RNA
atgtgggaaatgcagccagg

SEQ ID NO: 7956 - RNA, 20 nt, Homo sapiens
  source 1..20: mol_type = genomic RNA
tgtgggaaatgcagccaggc

SEQ ID NO: 7957 - RNA, 20 nt, Homo sapiens
  source 1..20: mol_type = genomic RNA
gtgggaaatgcagccaggcc

SEQ ID NO: 7958 - RNA, 20 nt, Homo sapiens
  source 1..20: mol_type = genomic RNA
tgggaaatgcagccaggcca

SEQ ID NO: 7959 - RNA, 20 nt, Homo sapiens
  source 1..20: mol_type = genomic RNA
gggaaatgcagccaggccaa

SEQ ID NO: 7960 - RNA, 20 nt, Homo sapiens
  source 1..20: mol_type = genomic RNA
ggaaatgcagccaggccaag

SEQ ID NO: 7961 - RNA, 20 nt, Homo sapiens
  source 1..20: mol_type = genomic RNA
gaaatgcagccaggccaaga

SEQ ID NO: 7962 - RNA, 20 nt, Homo sapiens
  source 1..20: mol_type = genomic RNA
aaatgcagccaggccaagat

SEQ ID NO: 7963 - RNA, 20 nt, Homo sapiens
  source 1..20: mol_type = genomic RNA
aatgcagccaggccaagatt

SEQ ID NO: 7964 - RNA, 20 nt, Homo sapiens
  source 1..20: mol_type = genomic RNA
atgcagccaggccaagattc

SEQ ID NO: 7965 - RNA, 20 nt, Homo sapiens
  source 1..20: mol_type = genomic RNA
tgcagccaggccaagattcg

SEQ ID NO: 7966 - RNA, 20 nt, Homo sapiens
  source 1..20: mol_type = genomic RNA
gcagccaggccaagattcga

SEQ ID NO: 7967 - RNA, 20 nt, Homo sapiens
  source 1..20: mol_type = genomic RNA
cagccaggccaagattcgag

SEQ ID NO: 7968 - RNA, 20 nt, Homo sapiens
  source 1..20: mol_type = genomic RNA
agccaggccaagattcgaga

SEQ ID NO: 7969 - RNA, 20 nt, Homo sapiens
  source 1..20: mol_type = genomic RNA
gccaggccaagattcgagag

SEQ ID NO: 7970 - RNA, 20 nt, Homo sapiens
  source 1..20: mol_type = genomic RNA
ccaggccaagattcgagagg

SEQ ID NO: 7971 - RNA, 20 nt, Homo sapiens
  source 1..20: mol_type = genomic RNA
caggccaagattcgagagga

SEQ ID NO: 7972 - RNA, 20 nt, Homo sapiens
  source 1..20: mol_type = genomic RNA
aggccaagattcgagaggaa

SEQ ID NO: 7973 - RNA, 20 nt, Homo sapiens
  source 1..20: mol_type = genomic RNA
ggccaagattcgagaggaac

SEQ ID NO: 7974 - RNA, 20 nt, Homo sapiens
  source 1..20: mol_type = genomic RNA
gccaagattcgagaggaaca

SEQ ID NO: 7975 - RNA, 20 nt, Homo sapiens
  source 1..20: mol_type = genomic RNA
ccaagattcgagaggaacaa

SEQ ID NO: 7976 - RNA, 20 nt, Homo sapiens
  source 1..20: mol_type = genomic RNA
caagattcgagaggaacaag

SEQ ID NO: 7977 - RNA, 20 nt, Homo sapiens
  source 1..20: mol_type = genomic RNA
aagattcgagaggaacaagc

SEQ ID NO: 7978 - RNA, 20 nt, Homo sapiens
  source 1..20: mol_type = genomic RNA
agattcgagaggaacaagct

SEQ ID NO: 7979 - RNA, 20 nt, Homo sapiens
  source 1..20: mol_type = genomic RNA
gattcgagaggaacaagcta

SEQ ID NO: 7980 - RNA, 20 nt, Homo sapiens
  source 1..20: mol_type = genomic RNA
attcgagaggaacaagctat

SEQ ID NO: 7981 - RNA, 20 nt, Homo sapiens
  source 1..20: mol_type = genomic RNA
ttcgagaggaacaagctatt

SEQ ID NO: 7982 - RNA, 20 nt, Homo sapiens
  source 1..20: mol_type = genomic RNA
tcgagaggaacaagctattg

SEQ ID NO: 7983 - RNA, 20 nt, Homo sapiens
  source 1..20: mol_type = genomic RNA
cgagaggaacaagctattgc

SEQ ID NO: 7984 - RNA, 20 nt, Homo sapiens
  source 1..20: mol_type = genomic RNA
gagaggaacaagctattgct

SEQ ID NO: 7985 - RNA, 20 nt, Homo sapiens
  source 1..20: mol_type = genomic RNA
agaggaacaagctattgctg

SEQ ID NO: 7986 - RNA, 20 nt, Homo sapiens
  source 1..20: mol_type = genomic RNA
gaggaacaagctattgctgg

SEQ ID NO: 7987 - RNA, 20 nt, Homo sapiens
  source 1..20: mol_type = genomic RNA
aggaacaagctattgctggt

SEQ ID NO: 7988 - RNA, 20 nt, Homo sapiens
  source 1..20: mol_type = genomic RNA
ggaacaagctattgctggtg

SEQ ID NO: 7989 - RNA, 20 nt, Homo sapiens
  source 1..20: mol_type = genomic RNA
gaacaagctattgctggtgg

SEQ ID NO: 7990 - RNA, 20 nt, Homo sapiens
  source 1..20: mol_type = genomic RNA
aacaagctattgctggtggc

SEQ ID NO: 7991 - RNA, 20 nt, Homo sapiens
  source 1..20: mol_type = genomic RNA
acaagctattgctggtggcc

SEQ ID NO: 7992 - RNA, 20 nt, Homo sapiens
  source 1..20: mol_type = genomic RNA
caagctattgctggtggcct

SEQ ID NO: 7993 - RNA, 20 nt, Homo sapiens
  source 1..20: mol_type = genomic RNA
aagctattgctggtggcctc

SEQ ID NO: 7994 - RNA, 20 nt, Homo sapiens
  source 1..20: mol_type = genomic RNA
agctattgctggtggcctct

SEQ ID NO: 7995 - RNA, 20 nt, Homo sapiens
  source 1..20: mol_type = genomic RNA
gctattgctggtggcctctg

SEQ ID NO: 7996 - RNA, 20 nt, Homo sapiens
  source 1..20: mol_type = genomic RNA
ctattgctggtggcctctgt

SEQ ID NO: 7997 - RNA, 20 nt, Homo sapiens
  source 1..20: mol_type = genomic RNA
tattgctggtggcctctgta

SEQ ID NO: 7998 - RNA, 20 nt, Homo sapiens
  source 1..20: mol_type = genomic RNA
attgctggtggcctctgtaa

SEQ ID NO: 7999 - RNA, 20 nt, Homo sapiens
  source 1..20: mol_type = genomic RNA
ttgctggtggcctctgtaat

SEQ ID NO: 8000 - RNA, 20 nt, Homo sapiens
  source 1..20: mol_type = genomic RNA
tgctggtggcctctgtaatt

SEQ ID NO: 8001 - RNA, 20 nt, Homo sapiens
  source 1..20: mol_type = genomic RNA
gctggtggcctctgtaattc

SEQ ID NO: 8002 - RNA, 20 nt, Homo sapiens
  source 1..20: mol_type = genomic RNA
ctggtggcctctgtaattca

SEQ ID NO: 8003 - RNA, 20 nt, Homo sapiens
  source 1..20: mol_type = genomic RNA
tggtggcctctgtaattcag

SEQ ID NO: 8004 - RNA, 20 nt, Homo sapiens
  source 1..20: mol_type = genomic RNA
ggtggcctctgtaattcagg

SEQ ID NO: 8005 - RNA, 20 nt, Homo sapiens
  source 1..20: mol_type = genomic RNA
gtggcctctgtaattcaggg

SEQ ID NO: 8006 - RNA, 20 nt, Homo sapiens
  source 1..20: mol_type = genomic RNA
tggcctctgtaattcaggga

SEQ ID NO: 8007 - RNA, 20 nt, Homo sapiens
  source 1..20: mol_type = genomic RNA
ggcctctgtaattcagggac

SEQ ID NO: 8008 - RNA, 20 nt, Homo sapiens
  source 1..20: mol_type = genomic RNA
gcctctgtaattcagggact

SEQ ID NO: 8009 - RNA, 20 nt, Homo sapiens
  source 1..20: mol_type = genomic RNA
cctctgtaattcagggactg

SEQ ID NO: 8010 - RNA, 20 nt, Homo sapiens
  source 1..20: mol_type = genomic RNA
ctctgtaattcagggactgg

SEQ ID NO: 8011 - RNA, 20 nt, Homo sapiens
  source 1..20: mol_type = genomic RNA
tctgtaattcagggactggg

SEQ ID NO: 8012 - RNA, 20 nt, Homo sapiens
  source 1..20: mol_type = genomic RNA
ctgtaattcagggactgggg

SEQ ID NO: 8013 - RNA, 20 nt, Homo sapiens
  source 1..20: mol_type = genomic RNA
tgtaattcagggactggggc

SEQ ID NO: 8014 - RNA, 20 nt, Homo sapiens
  source 1..20: mol_type = genomic RNA
gtaattcagggactggggct

SEQ ID NO: 8015 - RNA, 20 nt, Homo sapiens
  source 1..20: mol_type = genomic RNA
taattcagggactggggctg

SEQ ID NO: 8016 - RNA, 20 nt, Homo sapiens
  source 1..20: mol_type = genomic RNA
aattcagggactggggctgc

SEQ ID NO: 8017 - RNA, 20 nt, Homo sapiens
  source 1..20: mol_type = genomic RNA
attcagggactggggctgct

SEQ ID NO: 8018 - RNA, 20 nt, Homo sapiens
  source 1..20: mol_type = genomic RNA
ttcagggactggggctgctc

SEQ ID NO: 8019 - RNA, 20 nt, Homo sapiens
  source 1..20: mol_type = genomic RNA
tcagggactggggctgctcc

SEQ ID NO: 8020 - RNA, 20 nt, Homo sapiens
  source 1..20: mol_type = genomic RNA
cagggactggggctgctcct

SEQ ID NO: 8021 - RNA, 20 nt, Homo sapiens
  source 1..20: mol_type = genomic RNA
agggactggggctgctcctg

SEQ ID NO: 8022 - RNA, 20 nt, Homo sapiens
  source 1..20: mol_type = genomic RNA
gggactggggctgctcctgt

SEQ ID NO: 8023 - RNA, 20 nt, Homo sapiens
  source 1..20: mol_type = genomic RNA
ggactggggctgctcctgtg

SEQ ID NO: 8024 - RNA, 20 nt, Homo sapiens
  source 1..20: mol_type = genomic RNA
gactggggctgctcctgtgc

SEQ ID NO: 8025 - RNA, 20 nt, Homo sapiens
  source 1..20: mol_type = genomic RNA
actggggctgctcctgtgct

SEQ ID NO: 8026 - RNA, 20 nt, Homo sapiens
  source 1..20: mol_type = genomic RNA
ctggggctgctcctgtgctt

SEQ ID NO: 8027 - RNA, 20 nt, Homo sapiens
  source 1..20: mol_type = genomic RNA
tggggctgctcctgtgcttc

SEQ ID NO: 8028 - RNA, 20 nt, Homo sapiens
  source 1..20: mol_type = genomic RNA
ggggctgctcctgtgcttca

SEQ ID NO: 8029 - RNA, 20 nt, Homo sapiens
  source 1..20: mol_type = genomic RNA
gggctgctcctgtgcttcac

SEQ ID NO: 8030 - RNA, 20 nt, Homo sapiens
  source 1..20: mol_type = genomic RNA
ggctgctcctgtgcttcacc

SEQ ID NO: 8031 - RNA, 20 nt, Homo sapiens
  source 1..20: mol_type = genomic RNA
gctgctcctgtgcttcacct

SEQ ID NO: 8032 - RNA, 20 nt, Homo sapiens
  source 1..20: mol_type = genomic RNA
ctgctcctgtgcttcaccta

SEQ ID NO: 8033 - RNA, 20 nt, Homo sapiens
  source 1..20: mol_type = genomic RNA
tgctcctgtgcttcacctac

SEQ ID NO: 8034 - RNA, 20 nt, Homo sapiens
  source 1..20: mol_type = genomic RNA
gctcctgtgcttcacctaca

SEQ ID NO: 8035 - RNA, 20 nt, Homo sapiens
  source 1..20: mol_type = genomic RNA
ctcctgtgcttcacctacat

SEQ ID NO: 8036 - RNA, 20 nt, Homo sapiens
  source 1..20: mol_type = genomic RNA
tcctgtgcttcacctacatc

SEQ ID NO: 8037 - RNA, 20 nt, Homo sapiens
  source 1..20: mol_type = genomic RNA
cctgtgcttcacctacatct

SEQ ID NO: 8038 - RNA, 20 nt, Homo sapiens
  source 1..20: mol_type = genomic RNA
ctgtgcttcacctacatctg

SEQ ID NO: 8039 - RNA, 20 nt, Homo sapiens
  source 1..20: mol_type = genomic RNA
tgtgcttcacctacatctgc

SEQ ID NO: 8040 - RNA, 20 nt, Homo sapiens
  source 1..20: mol_type = genomic RNA
gtgcttcacctacatctgcc

SEQ ID NO: 8041 - RNA, 20 nt, Homo sapiens
  source 1..20: mol_type = genomic RNA
tgcttcacctacatctgcct

SEQ ID NO: 8042 - RNA, 20 nt, Homo sapiens
  source 1..20: mol_type = genomic RNA
gcttcacctacatctgcctg

SEQ ID NO: 8043 - RNA, 20 nt, Homo sapiens
  source 1..20: mol_type = genomic RNA
cttcacctacatctgcctgc

SEQ ID NO: 8044 - RNA, 20 nt, Homo sapiens
  source 1..20: mol_type = genomic RNA
ttcacctacatctgcctgca

SEQ ID NO: 8045 - RNA, 20 nt, Homo sapiens
  source 1..20: mol_type = genomic RNA
tcacctacatctgcctgcac

SEQ ID NO: 8046 - RNA, 20 nt, Homo sapiens
  source 1..20: mol_type = genomic RNA
cacctacatctgcctgcact

SEQ ID NO: 8047 - RNA, 20 nt, Homo sapiens
  source 1..20: mol_type = genomic RNA
acctacatctgcctgcactt

SEQ ID NO: 8048 - RNA, 20 nt, Homo sapiens
  source 1..20: mol_type = genomic RNA
cctacatctgcctgcacttc

SEQ ID NO: 8049 - RNA, 20 nt, Homo sapiens
  source 1..20: mol_type = genomic RNA
ctacatctgcctgcacttct

SEQ ID NO: 8050 - RNA, 20 nt, Homo sapiens
  source 1..20: mol_type = genomic RNA
tacatctgcctgcacttctc

SEQ ID NO: 8051 - RNA, 20 nt, Homo sapiens
  source 1..20: mol_type = genomic RNA
acatctgcctgcacttctct

SEQ ID NO: 8052 - RNA, 20 nt, Homo sapiens
  source 1..20: mol_type = genomic RNA
catctgcctgcacttctctg

SEQ ID NO: 8053 - RNA, 20 nt, Homo sapiens
  source 1..20: mol_type = genomic RNA
atctgcctgcacttctctgc

SEQ ID NO: 8054 - RNA, 20 nt, Homo sapiens
  source 1..20: mol_type = genomic RNA
tctgcctgcacttctctgct

SEQ ID NO: 8055 - RNA, 20 nt, Homo sapiens
  source 1..20: mol_type = genomic RNA
ctgcctgcacttctctgctc

SEQ ID NO: 8056 - RNA, 20 nt, Homo sapiens
  source 1..20: mol_type = genomic RNA
tgcctgcacttctctgctct

SEQ ID NO: 8057 - RNA, 20 nt, Homo sapiens
  source 1..20: mol_type = genomic RNA
gcctgcacttctctgctctt

SEQ ID NO: 8058 - RNA, 20 nt, Homo sapiens
  source 1..20: mol_type = genomic RNA
cctgcacttctctgctcttc

SEQ ID NO: 8059 - RNA, 20 nt, Homo sapiens
  source 1..20: mol_type = genomic RNA
ctgcacttctctgctcttca

SEQ ID NO: 8060 - RNA, 20 nt, Homo sapiens
  source 1..20: mol_type = genomic RNA
tgcacttctctgctcttcag

SEQ ID NO: 8061 - RNA, 20 nt, Homo sapiens
  source 1..20: mol_type = genomic RNA
gcacttctctgctcttcagg

SEQ ID NO: 8062 - RNA, 20 nt, Homo sapiens
  source 1..20: mol_type = genomic RNA
cacttctctgctcttcaggt

SEQ ID NO: 8063 - RNA, 20 nt, Homo sapiens
  source 1..20: mol_type = genomic RNA
acttctctgctcttcaggta

SEQ ID NO: 8064 - RNA, 20 nt, Homo sapiens
  source 1..20: mol_type = genomic RNA
cttctctgctcttcaggtat

SEQ ID NO: 8065 - RNA, 20 nt, Homo sapiens
  source 1..20: mol_type = genomic RNA
ttctctgctcttcaggtatc

SEQ ID NO: 8066 - RNA, 20 nt, Homo sapiens
  source 1..20: mol_type = genomic RNA
tctctgctcttcaggtatca

SEQ ID NO: 8067 - RNA, 20 nt, Homo sapiens
  source 1..20: mol_type = genomic RNA
ctctgctcttcaggtatcac

SEQ ID NO: 8068 - RNA, 20 nt, Homo sapiens
  source 1..20: mol_type = genomic RNA
tctgctcttcaggtatcaca

SEQ ID NO: 8069 - RNA, 20 nt, Homo sapiens
  source 1..20: mol_type = genomic RNA
ctgctcttcaggtatcacat

SEQ ID NO: 8070 - RNA, 20 nt, Homo sapiens
  source 1..20: mol_type = genomic RNA
tgctcttcaggtatcacatc

SEQ ID NO: 8071 - RNA, 20 nt, Homo sapiens
  source 1..20: mol_type = genomic RNA
gctcttcaggtatcacatcg

SEQ ID NO: 8072 - RNA, 20 nt, Homo sapiens
  source 1..20: mol_type = genomic RNA
ctcttcaggtatcacatcgg

SEQ ID NO: 8073 - RNA, 20 nt, Homo sapiens
  source 1..20: mol_type = genomic RNA
tcttcaggtatcacatcggt

SEQ ID NO: 8074 - RNA, 20 nt, Homo sapiens
  source 1..20: mol_type = genomic RNA
cttcaggtatcacatcggta

SEQ ID NO: 8075 - RNA, 20 nt, Homo sapiens
  source 1..20: mol_type = genomic RNA
ttcaggtatcacatcggtat

SEQ ID NO: 8076 - RNA, 20 nt, Homo sapiens
  source 1..20: mol_type = genomic RNA
tcaggtatcacatcggtatc

SEQ ID NO: 8077 - RNA, 20 nt, Homo sapiens
  source 1..20: mol_type = genomic RNA
caggtatcacatcggtatcc

SEQ ID NO: 8078 - RNA, 20 nt, Homo sapiens
  source 1..20: mol_type = genomic RNA
aggtatcacatcggtatcct

SEQ ID NO: 8079 - RNA, 20 nt, Homo sapiens
  source 1..20: mol_type = genomic RNA
ggtatcacatcggtatcctc

SEQ ID NO: 8080 - RNA, 20 nt, Homo sapiens
  source 1..20: mol_type = genomic RNA
gtatcacatcggtatcctcg

SEQ ID NO: 8081 - RNA, 20 nt, Homo sapiens
  source 1..20: mol_type = genomic RNA
tatcacatcggtatcctcga

SEQ ID NO: 8082 - RNA, 20 nt, Homo sapiens
  source 1..20: mol_type = genomic RNA
atcacatcggtatcctcgaa

SEQ ID NO: 8083 - RNA, 20 nt, Homo sapiens
  source 1..20: mol_type = genomic RNA
tcacatcggtatcctcgaat

SEQ ID NO: 8084 - RNA, 20 nt, Homo sapiens
  source 1..20: mol_type = genomic RNA
cacatcggtatcctcgaatt

SEQ ID NO: 8085 - RNA, 20 nt, Homo sapiens
  source 1..20: mol_type = genomic RNA
acatcggtatcctcgaattc

SEQ ID NO: 8086 - RNA, 20 nt, Homo sapiens
  source 1..20: mol_type = genomic RNA
catcggtatcctcgaattca

SEQ ID NO: 8087 - RNA, 20 nt, Homo sapiens
  source 1..20: mol_type = genomic RNA
atcggtatcctcgaattcaa

SEQ ID NO: 8088 - RNA, 20 nt, Homo sapiens
  source 1..20: mol_type = genomic RNA
tcggtatcctcgaattcaaa

SEQ ID NO: 8089 - RNA, 20 nt, Homo sapiens
  source 1..20: mol_type = genomic RNA
cggtatcctcgaattcaaag

SEQ ID NO: 8090 - RNA, 20 nt, Homo sapiens
  source 1..20: mol_type = genomic RNA
ggtatcctcgaattcaaagt

SEQ ID NO: 8091 - RNA, 20 nt, Homo sapiens
  source 1..20: mol_type = genomic RNA
gtatcctcgaattcaaagta

SEQ ID NO: 8092 - RNA, 20 nt, Homo sapiens
  source 1..20: mol_type = genomic RNA
tatcctcgaattcaaagtat

SEQ ID NO: 8093 - RNA, 20 nt, Homo sapiens
  source 1..20: mol_type = genomic RNA
atcctcgaattcaaagtatc

SEQ ID NO: 8094 - RNA, 20 nt, Homo sapiens
  source 1..20: mol_type = genomic RNA
tcctcgaattcaaagtatca

SEQ ID NO: 8095 - RNA, 20 nt, Homo sapiens
  source 1..20: mol_type = genomic RNA
cctcgaattcaaagtatcaa

SEQ ID NO: 8096 - RNA, 20 nt, Homo sapiens
  source 1..20: mol_type = genomic RNA
ctcgaattcaaagtatcaaa

SEQ ID NO: 8097 - RNA, 20 nt, Homo sapiens
  source 1..20: mol_type = genomic RNA
tcgaattcaaagtatcaaag

SEQ ID NO: 8098 - RNA, 20 nt, Homo sapiens
  source 1..20: mol_type = genomic RNA
cgaattcaaagtatcaaagt

SEQ ID NO: 8099 - RNA, 20 nt, Homo sapiens
  source 1..20: mol_type = genomic RNA
gaattcaaagtatcaaagta

SEQ ID NO: 8100 - RNA, 20 nt, Homo sapiens
  source 1..20: mol_type = genomic RNA
aattcaaagtatcaaagtac

SEQ ID NO: 8101 - RNA, 20 nt, Homo sapiens
  source 1..20: mol_type = genomic RNA
attcaaagtatcaaagtaca

SEQ ID NO: 8102 - RNA, 20 nt, Homo sapiens
  source 1..20: mol_type = genomic RNA
ttcaaagtatcaaagtacaa

SEQ ID NO: 8103 - RNA, 20 nt, Homo sapiens
  source 1..20: mol_type = genomic RNA
tcaaagtatcaaagtacaat

SEQ ID NO: 8104 - RNA, 20 nt, Homo sapiens
  source 1..20: mol_type = genomic RNA
caaagtatcaaagtacaatt

SEQ ID NO: 8105 - RNA, 20 nt, Homo sapiens
  source 1..20: mol_type = genomic RNA
aaagtatcaaagtacaattt

SEQ ID NO: 8106 - RNA, 20 nt, Homo sapiens
  source 1..20: mol_type = genomic RNA
aagtatcaaagtacaattta

SEQ ID NO: 8107 - RNA, 20 nt, Homo sapiens
  source 1..20: mol_type = genomic RNA
agtatcaaagtacaatttac

SEQ ID NO: 8108 - RNA, 20 nt, Homo sapiens
  source 1..20: mol_type = genomic RNA
gtatcaaagtacaatttacc

SEQ ID NO: 8109 - RNA, 20 nt, Homo sapiens
  source 1..20: mol_type = genomic RNA
tatcaaagtacaatttaccg

SEQ ID NO: 8110 - RNA, 20 nt, Homo sapiens
  source 1..20: mol_type = genomic RNA
atcaaagtacaatttaccga

SEQ ID NO: 8111 - RNA, 20 nt, Homo sapiens
  source 1..20: mol_type = genomic RNA
tcaaagtacaatttaccgaa

SEQ ID NO: 8112 - RNA, 20 nt, Homo sapiens
  source 1..20: mol_type = genomic RNA
caaagtacaatttaccgaat

SEQ ID NO: 8113 - RNA, 20 nt, Homo sapiens
  source 1..20: mol_type = genomic RNA
aaagtacaatttaccgaata

SEQ ID NO: 8114 - RNA, 20 nt, Homo sapiens
  source 1..20: mol_type = genomic RNA
aagtacaatttaccgaatat

SEQ ID NO: 8115 - RNA, 20 nt, Homo sapiens
  source 1..20: mol_type = genomic RNA
agtacaatttaccgaatata

SEQ ID NO: 8116 - RNA, 20 nt, Homo sapiens
  source 1..20: mol_type = genomic RNA
gtacaatttaccgaatataa

SEQ ID NO: 8117 - RNA, 20 nt, Homo sapiens
  source 1..20: mol_type = genomic RNA
tacaatttaccgaatataag

SEQ ID NO: 8118 - RNA, 20 nt, Homo sapiens
  source 1..20: mol_type = genomic RNA
acaatttaccgaatataaga

SEQ ID NO: 8119 - RNA, 20 nt, Homo sapiens
  source 1..20: mol_type = genomic RNA
caatttaccgaatataagaa

SEQ ID NO: 8120 - RNA, 20 nt, Homo sapiens
  source 1..20: mol_type = genomic RNA
aatttaccgaatataagaag

SEQ ID NO: 8121 - RNA, 20 nt, Homo sapiens
  source 1..20: mol_type = genomic RNA
atttaccgaatataagaagg

SEQ ID NO: 8122 - RNA, 20 nt, Homo sapiens
  source 1..20: mol_type = genomic RNA
tttaccgaatataagaagga

SEQ ID NO: 8123 - RNA, 20 nt, Homo sapiens
  source 1..20: mol_type = genomic RNA
ttaccgaatataagaaggag

SEQ ID NO: 8124 - RNA, 20 nt, Homo sapiens
  source 1..20: mol_type = genomic RNA
taccgaatataagaaggaga

SEQ ID NO: 8125 - RNA, 20 nt, Homo sapiens
  source 1..20: mol_type = genomic RNA
accgaatataagaaggagaa

SEQ ID NO: 8126 - RNA, 20 nt, Homo sapiens
  source 1..20: mol_type = genomic RNA
ccgaatataagaaggagaaa

SEQ ID NO: 8127 - RNA, 20 nt, Homo sapiens
  source 1..20: mol_type = genomic RNA
cgaatataagaaggagaaag

SEQ ID NO: 8128 - RNA, 20 nt, Homo sapiens
  source 1..20: mol_type = genomic RNA
gaatataagaaggagaaagg

SEQ ID NO: 8129 - RNA, 20 nt, Homo sapiens
  source 1..20: mol_type = genomic RNA
aatataagaaggagaaaggt

SEQ ID NO: 8130 - RNA, 20 nt, Homo sapiens
  source 1..20: mol_type = genomic RNA
atataagaaggagaaaggtt

SEQ ID NO: 8131 - RNA, 20 nt, Homo sapiens
  source 1..20: mol_type = genomic RNA
tataagaaggagaaaggttt

SEQ ID NO: 8132 - RNA, 20 nt, Homo sapiens
  source 1..20: mol_type = genomic RNA
ataagaaggagaaaggtttc

SEQ ID NO: 8133 - RNA, 20 nt, Homo sapiens
  source 1..20: mol_type = genomic RNA
taagaaggagaaaggtttca

SEQ ID NO: 8134 - RNA, 20 nt, Homo sapiens
  source 1..20: mol_type = genomic RNA
aagaaggagaaaggtttcat

SEQ ID NO: 8135 - RNA, 20 nt, Homo sapiens
  source 1..20: mol_type = genomic RNA
agaaggagaaaggtttcatc

SEQ ID NO: 8136 - RNA, 20 nt, Homo sapiens
  source 1..20: mol_type = genomic RNA
gaaggagaaaggtttcatcc

SEQ ID NO: 8137 - RNA, 20 nt, Homo sapiens
  source 1..20: mol_type = genomic RNA
aaggagaaaggtttcatcct

SEQ ID NO: 8138 - RNA, 20 nt, Homo sapiens
  source 1..20: mol_type = genomic RNA
aggagaaaggtttcatcctc

SEQ ID NO: 8139 - RNA, 20 nt, Homo sapiens
  source 1..20: mol_type = genomic RNA
ggagaaaggtttcatcctca

SEQ ID NO: 8140 - RNA, 20 nt, Homo sapiens
  source 1..20: mol_type = genomic RNA
gagaaaggtttcatcctcac

SEQ ID NO: 8141 - RNA, 20 nt, Homo sapiens
  source 1..20: mol_type = genomic RNA
agaaaggtttcatcctcact

SEQ ID NO: 8142 - RNA, 20 nt, Homo sapiens
  source 1..20: mol_type = genomic RNA
gaaaggtttcatcctcactt

SEQ ID NO: 8143 - RNA, 20 nt, Homo sapiens
  source 1..20: mol_type = genomic RNA
aaaggtttcatcctcacttc

SEQ ID NO: 8144 - RNA, 20 nt, Homo sapiens
  source 1..20: mol_type = genomic RNA
aaggtttcatcctcacttcc

SEQ ID NO: 8145 - RNA, 20 nt, Homo sapiens
  source 1..20: mol_type = genomic RNA
aggtttcatcctcacttccc

SEQ ID NO: 8146 - RNA, 20 nt, Homo sapiens
  source 1..20: mol_type = genomic RNA
ggtttcatcctcacttccca

SEQ ID NO: 8147 - RNA, 20 nt, Homo sapiens
  source 1..20: mol_type = genomic RNA
gtttcatcctcacttcccaa

SEQ ID NO: 8148 - RNA, 20 nt, Homo sapiens
  source 1..20: mol_type = genomic RNA
tttcatcctcacttcccaaa

SEQ ID NO: 8149 - RNA, 20 nt, Homo sapiens
  source 1..20: mol_type = genomic RNA
ttcatcctcacttcccaaaa

SEQ ID NO: 8150 - RNA, 20 nt, Homo sapiens
  source 1..20: mol_type = genomic RNA
tcatcctcacttcccaaaag

SEQ ID NO: 8151 - RNA, 20 nt, Homo sapiens
  source 1..20: mol_type = genomic RNA
catcctcacttcccaaaagg

SEQ ID NO: 8152 - RNA, 20 nt, Homo sapiens
  source 1..20: mol_type = genomic RNA
atcctcacttcccaaaagga

SEQ ID NO: 8153 - RNA, 20 nt, Homo sapiens
  source 1..20: mol_type = genomic RNA
tcctcacttcccaaaaggag

SEQ ID NO: 8154 - RNA, 20 nt, Homo sapiens
  source 1..20: mol_type = genomic RNA
cctcacttcccaaaaggagg

SEQ ID NO: 8155 - RNA, 20 nt, Homo sapiens
  source 1..20: mol_type = genomic RNA
ctcacttcccaaaaggagga

SEQ ID NO: 8156 - RNA, 20 nt, Homo sapiens
  source 1..20: mol_type = genomic RNA
tcacttcccaaaaggaggat

SEQ ID NO: 8157 - RNA, 20 nt, Homo sapiens
  source 1..20: mol_type = genomic RNA
cacttcccaaaaggaggatg

SEQ ID NO: 8158 - RNA, 20 nt, Homo sapiens
  source 1..20: mol_type = genomic RNA
acttcccaaaaggaggatga

SEQ ID NO: 8159 - RNA, 20 nt, Homo sapiens
  source 1..20: mol_type = genomic RNA
cttcccaaaaggaggatgaa

SEQ ID NO: 8160 - RNA, 20 nt, Homo sapiens
  source 1..20: mol_type = genomic RNA
ttcccaaaaggaggatgaaa

SEQ ID NO: 8161 - RNA, 20 nt, Homo sapiens
  source 1..20: mol_type = genomic RNA
tcccaaaaggaggatgaaat

SEQ ID NO: 8162 - RNA, 20 nt, Homo sapiens
  source 1..20: mol_type = genomic RNA
cccaaaaggaggatgaaatc

SEQ ID NO: 8163 - RNA, 20 nt, Homo sapiens
  source 1..20: mol_type = genomic RNA
ccaaaaggaggatgaaatca

SEQ ID NO: 8164 - RNA, 20 nt, Homo sapiens
  source 1..20: mol_type = genomic RNA
caaaaggaggatgaaatcat

SEQ ID NO: 8165 - RNA, 20 nt, Homo sapiens
  source 1..20: mol_type = genomic RNA
aaaaggaggatgaaatcatg

SEQ ID NO: 8166 - RNA, 20 nt, Homo sapiens
  source 1..20: mol_type = genomic RNA
aaaggaggatgaaatcatga

SEQ ID NO: 8167 - RNA, 20 nt, Homo sapiens
  source 1..20: mol_type = genomic RNA
aaggaggatgaaatcatgaa

SEQ ID NO: 8168 - RNA, 20 nt, Homo sapiens
  source 1..20: mol_type = genomic RNA
aggaggatgaaatcatgaag

SEQ ID NO: 8169 - RNA, 20 nt, Homo sapiens
  source 1..20: mol_type = genomic RNA
ggaggatgaaatcatgaagg

SEQ ID NO: 8170 - RNA, 20 nt, Homo sapiens
  source 1..20: mol_type = genomic RNA
gaggatgaaatcatgaaggt

SEQ ID NO: 8171 - RNA, 20 nt, Homo sapiens
  source 1..20: mol_type = genomic RNA
aggatgaaatcatgaaggtg

SEQ ID NO: 8172 - RNA, 20 nt, Homo sapiens
  source 1..20: mol_type = genomic RNA
ggatgaaatcatgaaggtgc

SEQ ID NO: 8173 - RNA, 20 nt, Homo sapiens
  source 1..20: mol_type = genomic RNA
gatgaaatcatgaaggtgca

SEQ ID NO: 8174 - RNA, 20 nt, Homo sapiens
  source 1..20: mol_type = genomic RNA
atgaaatcatgaaggtgcag

SEQ ID NO: 8175 - RNA, 20 nt, Homo sapiens
  source 1..20: mol_type = genomic RNA
tgaaatcatgaaggtgcaga

SEQ ID NO: 8176 - RNA, 20 nt, Homo sapiens
  source 1..20: mol_type = genomic RNA
gaaatcatgaaggtgcagaa

SEQ ID NO: 8177 - RNA, 20 nt, Homo sapiens
  source 1..20: mol_type = genomic RNA
aaatcatgaaggtgcagaac

SEQ ID NO: 8178 - RNA, 20 nt, Homo sapiens
  source 1..20: mol_type = genomic RNA
aatcatgaaggtgcagaaca

SEQ ID NO: 8179 - RNA, 20 nt, Homo sapiens
  source 1..20: mol_type = genomic RNA
atcatgaaggtgcagaacaa

SEQ ID NO: 8180 - RNA, 20 nt, Homo sapiens
  source 1..20: mol_type = genomic RNA
tcatgaaggtgcagaacaac

SEQ ID NO: 8181 - RNA, 20 nt, Homo sapiens
  source 1..20: mol_type = genomic RNA
catgaaggtgcagaacaact

SEQ ID NO: 8182 - RNA, 20 nt, Homo sapiens
  source 1..20: mol_type = genomic RNA
atgaaggtgcagaacaactc

SEQ ID NO: 8183 - RNA, 20 nt, Homo sapiens
  source 1..20: mol_type = genomic RNA
tgaaggtgcagaacaactca

SEQ ID NO: 8184 - RNA, 20 nt, Homo sapiens
  source 1..20: mol_type = genomic RNA
gaaggtgcagaacaactcag

SEQ ID NO: 8185 - RNA, 20 nt, Homo sapiens
  source 1..20: mol_type = genomic RNA
aaggtgcagaacaactcagt

SEQ ID NO: 8186 - RNA, 20 nt, Homo sapiens
  source 1..20: mol_type = genomic RNA
aggtgcagaacaactcagtc

SEQ ID NO: 8187 - RNA, 20 nt, Homo sapiens
  source 1..20: mol_type = genomic RNA
ggtgcagaacaactcagtca

SEQ ID NO: 8188 - RNA, 20 nt, Homo sapiens
  source 1..20: mol_type = genomic RNA
gtgcagaacaactcagtcat

SEQ ID NO: 8189 - RNA, 20 nt, Homo sapiens
  source 1..20: mol_type = genomic RNA
tgcagaacaactcagtcatc

SEQ ID NO: 8190 - RNA, 20 nt, Homo sapiens
  source 1..20: mol_type = genomic RNA
gcagaacaactcagtcatca

SEQ ID NO: 8191 - RNA, 20 nt, Homo sapiens
  source 1..20: mol_type = genomic RNA
cagaacaactcagtcatcat

SEQ ID NO: 8192 - RNA, 20 nt, Homo sapiens
  source 1..20: mol_type = genomic RNA
agaacaactcagtcatcatc

SEQ ID NO: 8193 - RNA, 20 nt, Homo sapiens
  source 1..20: mol_type = genomic RNA
gaacaactcagtcatcatca

SEQ ID NO: 8194 - RNA, 20 nt, Homo sapiens
  source 1..20: mol_type = genomic RNA
aacaactcagtcatcatcaa

SEQ ID NO: 8195 - RNA, 20 nt, Homo sapiens
  source 1..20: mol_type = genomic RNA
acaactcagtcatcatcaac

SEQ ID NO: 8196 - RNA, 20 nt, Homo sapiens
  source 1..20: mol_type = genomic RNA
caactcagtcatcatcaact

SEQ ID NO: 8197 - RNA, 20 nt, Homo sapiens
  source 1..20: mol_type = genomic RNA
aactcagtcatcatcaactg

SEQ ID NO: 8198 - RNA, 20 nt, Homo sapiens
  source 1..20: mol_type = genomic RNA
actcagtcatcatcaactgt

SEQ ID NO: 8199 - RNA, 20 nt, Homo sapiens
  source 1..20: mol_type = genomic RNA
ctcagtcatcatcaactgtg

SEQ ID NO: 8200 - RNA, 20 nt, Homo sapiens
  source 1..20: mol_type = genomic RNA
tcagtcatcatcaactgtga

SEQ ID NO: 8201 - RNA, 20 nt, Homo sapiens
  source 1..20: mol_type = genomic RNA
cagtcatcatcaactgtgat

SEQ ID NO: 8202 - RNA, 20 nt, Homo sapiens
  source 1..20: mol_type = genomic RNA
agtcatcatcaactgtgatg

SEQ ID NO: 8203 - RNA, 20 nt, Homo sapiens
  source 1..20: mol_type = genomic RNA
gtcatcatcaactgtgatgg

SEQ ID NO: 8204 - RNA, 20 nt, Homo sapiens
  source 1..20: mol_type = genomic RNA
tcatcatcaactgtgatggg

SEQ ID NO: 8205 - RNA, 20 nt, Homo sapiens
  source 1..20: mol_type = genomic RNA
catcatcaactgtgatgggt

SEQ ID NO: 8206 - RNA, 20 nt, Homo sapiens
  source 1..20: mol_type = genomic RNA
atcatcaactgtgatgggtt

SEQ ID NO: 8207 - RNA, 20 nt, Homo sapiens
  source 1..20: mol_type = genomic RNA
tcatcaactgtgatgggttt

SEQ ID NO: 8208 - RNA, 20 nt, Homo sapiens
  source 1..20: mol_type = genomic RNA
catcaactgtgatgggtttt

SEQ ID NO: 8209 - RNA, 20 nt, Homo sapiens
  source 1..20: mol_type = genomic RNA
atcaactgtgatgggtttta

SEQ ID NO: 8210 - RNA, 20 nt, Homo sapiens
  source 1..20: mol_type = genomic RNA
tcaactgtgatgggttttat

SEQ ID NO: 8211 - RNA, 20 nt, Homo sapiens
  source 1..20: mol_type = genomic RNA
caactgtgatgggttttatc

SEQ ID NO: 8212 - RNA, 20 nt, Homo sapiens
  source 1..20: mol_type = genomic RNA
aactgtgatgggttttatct

SEQ ID NO: 8213 - RNA, 20 nt, Homo sapiens
  source 1..20: mol_type = genomic RNA
actgtgatgggttttatctc

SEQ ID NO: 8214 - RNA, 20 nt, Homo sapiens
  source 1..20: mol_type = genomic RNA
ctgtgatgggttttatctca

SEQ ID NO: 8215 - RNA, 20 nt, Homo sapiens
  source 1..20: mol_type = genomic RNA
tgtgatgggttttatctcat

SEQ ID NO: 8216 - RNA, 20 nt, Homo sapiens
  source 1..20: mol_type = genomic RNA
gtgatgggttttatctcatc

SEQ ID NO: 8217 - RNA, 20 nt, Homo sapiens
  source 1..20: mol_type = genomic RNA
tgatgggttttatctcatct

SEQ ID NO: 8218 - RNA, 20 nt, Homo sapiens
  source 1..20: mol_type = genomic RNA
gatgggttttatctcatctc

SEQ ID NO: 8219 - RNA, 20 nt, Homo sapiens
  source 1..20: mol_type = genomic RNA
atgggttttatctcatctcc

SEQ ID NO: 8220 - RNA, 20 nt, Homo sapiens
  source 1..20: mol_type = genomic RNA
tgggttttatctcatctccc

SEQ ID NO: 8221 - RNA, 20 nt, Homo sapiens
  source 1..20: mol_type = genomic RNA
gggttttatctcatctccct

SEQ ID NO: 8222 - RNA, 20 nt, Homo sapiens
  source 1..20: mol_type = genomic RNA
ggttttatctcatctccctg

SEQ ID NO: 8223 - RNA, 20 nt, Homo sapiens
  source 1..20: mol_type = genomic RNA
gttttatctcatctccctga

SEQ ID NO: 8224 - RNA, 20 nt, Homo sapiens
  source 1..20: mol_type = genomic RNA
ttttatctcatctccctgaa

SEQ ID NO: 8225 - RNA, 20 nt, Homo sapiens
  source 1..20: mol_type = genomic RNA
tttatctcatctccctgaag

SEQ ID NO: 8226 - RNA, 20 nt, Homo sapiens
  source 1..20: mol_type = genomic RNA
ttatctcatctccctgaagg

SEQ ID NO: 8227 - RNA, 20 nt, Homo sapiens
  source 1..20: mol_type = genomic RNA
tatctcatctccctgaaggg

SEQ ID NO: 8228 - RNA, 20 nt, Homo sapiens
  source 1..20: mol_type = genomic RNA
atctcatctccctgaagggc

SEQ ID NO: 8229 - RNA, 20 nt, Homo sapiens
  source 1..20: mol_type = genomic RNA
tctcatctccctgaagggct

SEQ ID NO: 8230 - RNA, 20 nt, Homo sapiens
  source 1..20: mol_type = genomic RNA
ctcatctccctgaagggcta

SEQ ID NO: 8231 - RNA, 20 nt, Homo sapiens
  source 1..20: mol_type = genomic RNA
tcatctccctgaagggctac

SEQ ID NO: 8232 - RNA, 20 nt, Homo sapiens
  source 1..20: mol_type = genomic RNA
catctccctgaagggctact

SEQ ID NO: 8233 - RNA, 20 nt, Homo sapiens
  source 1..20: mol_type = genomic RNA
atctccctgaagggctactt

SEQ ID NO: 8234 - RNA, 20 nt, Homo sapiens
  source 1..20: mol_type = genomic RNA
tctccctgaagggctacttc

SEQ ID NO: 8235 - RNA, 20 nt, Homo sapiens
  source 1..20: mol_type = genomic RNA
ctccctgaagggctacttct

SEQ ID NO: 8236 - RNA, 20 nt, Homo sapiens
  source 1..20: mol_type = genomic RNA
tccctgaagggctacttctc

SEQ ID NO: 8237 - RNA, 20 nt, Homo sapiens
  source 1..20: mol_type = genomic RNA
ccctgaagggctacttctcc

SEQ ID NO: 8238 - RNA, 20 nt, Homo sapiens
  source 1..20: mol_type = genomic RNA
cctgaagggctacttctccc

SEQ ID NO: 8239 - RNA, 20 nt, Homo sapiens
  source 1..20: mol_type = genomic RNA
ctgaagggctacttctccca

SEQ ID NO: 8240 - RNA, 20 nt, Homo sapiens
  source 1..20: mol_type = genomic RNA
tgaagggctacttctcccag

SEQ ID NO: 8241 - RNA, 20 nt, Homo sapiens
  source 1..20: mol_type = genomic RNA
gaagggctacttctcccagg

SEQ ID NO: 8242 - RNA, 20 nt, Homo sapiens
  source 1..20: mol_type = genomic RNA
aagggctacttctcccagga

SEQ ID NO: 8243 - RNA, 20 nt, Homo sapiens
  source 1..20: mol_type = genomic RNA
agggctacttctcccaggaa

SEQ ID NO: 8244 - RNA, 20 nt, Homo sapiens
  source 1..20: mol_type = genomic RNA
gggctacttctcccaggaag

SEQ ID NO: 8245 - RNA, 20 nt, Homo sapiens
  source 1..20: mol_type = genomic RNA
ggctacttctcccaggaagt

SEQ ID NO: 8246 - RNA, 20 nt, Homo sapiens
  source 1..20: mol_type = genomic RNA
gctacttctcccaggaagtc

SEQ ID NO: 8247 - RNA, 20 nt, Homo sapiens
  source 1..20: mol_type = genomic RNA
ctacttctcccaggaagtca

SEQ ID NO: 8248 - RNA, 20 nt, Homo sapiens
  source 1..20: mol_type = genomic RNA
tacttctcccaggaagtcaa

SEQ ID NO: 8249 - RNA, 20 nt, Homo sapiens
  source 1..20: mol_type = genomic RNA
acttctcccaggaagtcaac

SEQ ID NO: 8250 - RNA, 20 nt, Homo sapiens
  source 1..20: mol_type = genomic RNA
cttctcccaggaagtcaaca

SEQ ID NO: 8251 - RNA, 20 nt, Homo sapiens
  source 1..20: mol_type = genomic RNA
ttctcccaggaagtcaacat

SEQ ID NO: 8252 - RNA, 20 nt, Homo sapiens
  source 1..20: mol_type = genomic RNA
tctcccaggaagtcaacatt

SEQ ID NO: 8253 - RNA, 20 nt, Homo sapiens
  source 1..20: mol_type = genomic RNA
ctcccaggaagtcaacatta

SEQ ID NO: 8254 - RNA, 20 nt, Homo sapiens
  source 1..20: mol_type = genomic RNA
tcccaggaagtcaacattag

SEQ ID NO: 8255 - RNA, 20 nt, Homo sapiens
  source 1..20: mol_type = genomic RNA
cccaggaagtcaacattagc

SEQ ID NO: 8256 - RNA, 20 nt, Homo sapiens
  source 1..20: mol_type = genomic RNA
ccaggaagtcaacattagcc

SEQ ID NO: 8257 - RNA, 20 nt, Homo sapiens
  source 1..20: mol_type = genomic RNA
caggaagtcaacattagcct

SEQ ID NO: 8258 - RNA, 20 nt, Homo sapiens
  source 1..20: mol_type = genomic RNA
aggaagtcaacattagcctt

SEQ ID NO: 8259 - RNA, 20 nt, Homo sapiens
  source 1..20: mol_type = genomic RNA
ggaagtcaacattagccttc

SEQ ID NO: 8260 - RNA, 20 nt, Homo sapiens
  source 1..20: mol_type = genomic RNA
gaagtcaacattagccttca

SEQ ID NO: 8261 - RNA, 20 nt, Homo sapiens
  source 1..20: mol_type = genomic RNA
aagtcaacattagccttcat

SEQ ID NO: 8262 - RNA, 20 nt, Homo sapiens
  source 1..20: mol_type = genomic RNA
agtcaacattagccttcatt

SEQ ID NO: 8263 - RNA, 20 nt, Homo sapiens
  source 1..20: mol_type = genomic RNA
gtcaacattagccttcatta

SEQ ID NO: 8264 - RNA, 20 nt, Homo sapiens
  source 1..20: mol_type = genomic RNA
tcaacattagccttcattac

SEQ ID NO: 8265 - RNA, 20 nt, Homo sapiens
  source 1..20: mol_type = genomic RNA
caacattagccttcattacc

SEQ ID NO: 8266 - RNA, 20 nt, Homo sapiens
  source 1..20: mol_type = genomic RNA
aacattagccttcattacca

SEQ ID NO: 8267 - RNA, 20 nt, Homo sapiens
  source 1..20: mol_type = genomic RNA
acattagccttcattaccag

SEQ ID NO: 8268 - RNA, 20 nt, Homo sapiens
  source 1..20: mol_type = genomic RNA
cattagccttcattaccaga

SEQ ID NO: 8269 - RNA, 20 nt, Homo sapiens
  source 1..20: mol_type = genomic RNA
attagccttcattaccagaa

SEQ ID NO: 8270 - RNA, 20 nt, Homo sapiens
  source 1..20: mol_type = genomic RNA
ttagccttcattaccagaag

SEQ ID NO: 8271 - RNA, 20 nt, Homo sapiens
  source 1..20: mol_type = genomic RNA
tagccttcattaccagaagg

SEQ ID NO: 8272 - RNA, 20 nt, Homo sapiens
  source 1..20: mol_type = genomic RNA
agccttcattaccagaagga

SEQ ID NO: 8273 - RNA, 20 nt, Homo sapiens
  source 1..20: mol_type = genomic RNA
gccttcattaccagaaggat

SEQ ID NO: 8274 - RNA, 20 nt, Homo sapiens
  source 1..20: mol_type = genomic RNA
ccttcattaccagaaggatg

SEQ ID NO: 8275 - RNA, 20 nt, Homo sapiens
  source 1..20: mol_type = genomic RNA
cttcattaccagaaggatga

SEQ ID NO: 8276 - RNA, 20 nt, Homo sapiens
  source 1..20: mol_type = genomic RNA
ttcattaccagaaggatgag

SEQ ID NO: 8277 - RNA, 20 nt, Homo sapiens
  source 1..20: mol_type = genomic RNA
tcattaccagaaggatgagg

SEQ ID NO: 8278 - RNA, 20 nt, Homo sapiens
  source 1..20: mol_type = genomic RNA
cattaccagaaggatgagga

SEQ ID NO: 8279 - RNA, 20 nt, Homo sapiens
  source 1..20: mol_type = genomic RNA
attaccagaaggatgaggag

SEQ ID NO: 8280 - RNA, 20 nt, Homo sapiens
  source 1..20: mol_type = genomic RNA
ttaccagaaggatgaggagc

SEQ ID NO: 8281 - RNA, 20 nt, Homo sapiens
  source 1..20: mol_type = genomic RNA
taccagaaggatgaggagcc

SEQ ID NO: 8282 - RNA, 20 nt, Homo sapiens
  source 1..20: mol_type = genomic RNA
accagaaggatgaggagccc

SEQ ID NO: 8283 - RNA, 20 nt, Homo sapiens
  source 1..20: mol_type = genomic RNA
ccagaaggatgaggagcccc

SEQ ID NO: 8284 - RNA, 20 nt, Homo sapiens
  source 1..20: mol_type = genomic RNA
cagaaggatgaggagcccct

SEQ ID NO: 8285 - RNA, 20 nt, Homo sapiens
  source 1..20: mol_type = genomic RNA
agaaggatgaggagcccctc

SEQ ID NO: 8286 - RNA, 20 nt, Homo sapiens
  source 1..20: mol_type = genomic RNA
gaaggatgaggagcccctct

SEQ ID NO: 8287 - RNA, 20 nt, Homo sapiens
  source 1..20: mol_type = genomic RNA
aaggatgaggagcccctctt

SEQ ID NO: 8288 - RNA, 20 nt, Homo sapiens
  source 1..20: mol_type = genomic RNA
aggatgaggagcccctcttc

SEQ ID NO: 8289 - RNA, 20 nt, Homo sapiens
  source 1..20: mol_type = genomic RNA
ggatgaggagcccctcttcc

SEQ ID NO: 8290 - RNA, 20 nt, Homo sapiens
  source 1..20: mol_type = genomic RNA
gatgaggagcccctcttcca

SEQ ID NO: 8291 - RNA, 20 nt, Homo sapiens
  source 1..20: mol_type = genomic RNA
atgaggagcccctcttccaa

SEQ ID NO: 8292 - RNA, 20 nt, Homo sapiens
  source 1..20: mol_type = genomic RNA
tgaggagcccctcttccaac

SEQ ID NO: 8293 - RNA, 20 nt, Homo sapiens
  source 1..20: mol_type = genomic RNA
gaggagcccctcttccaact

SEQ ID NO: 8294 - RNA, 20 nt, Homo sapiens
  source 1..20: mol_type = genomic RNA
aggagcccctcttccaactg

SEQ ID NO: 8295 - RNA, 20 nt, Homo sapiens
  source 1..20: mol_type = genomic RNA
ggagcccctcttccaactga

SEQ ID NO: 8296 - RNA, 20 nt, Homo sapiens
  source 1..20: mol_type = genomic RNA
gagcccctcttccaactgaa

SEQ ID NO: 8297 - RNA, 20 nt, Homo sapiens
  source 1..20: mol_type = genomic RNA
agcccctcttccaactgaag

SEQ ID NO: 8298 - RNA, 20 nt, Homo sapiens
  source 1..20: mol_type = genomic RNA
gcccctcttccaactgaaga

SEQ ID NO: 8299 - RNA, 20 nt, Homo sapiens
  source 1..20: mol_type = genomic RNA
cccctcttccaactgaagaa

SEQ ID NO: 8300 - RNA, 20 nt, Homo sapiens
  source 1..20: mol_type = genomic RNA
ccctcttccaactgaagaag

SEQ ID NO: 8301 - RNA, 20 nt, Homo sapiens
  source 1..20: mol_type = genomic RNA
cctcttccaactgaagaagg

SEQ ID NO: 8302 - RNA, 20 nt, Homo sapiens
  source 1..20: mol_type = genomic RNA
ctcttccaactgaagaaggt

SEQ ID NO: 8303 - RNA, 20 nt, Homo sapiens
  source 1..20: mol_type = genomic RNA
tcttccaactgaagaaggtc

SEQ ID NO: 8304 - RNA, 20 nt, Homo sapiens
  source 1..20: mol_type = genomic RNA
cttccaactgaagaaggtca

SEQ ID NO: 8305 - RNA, 20 nt, Homo sapiens
  source 1..20: mol_type = genomic RNA
ttccaactgaagaaggtcag

SEQ ID NO: 8306 - RNA, 20 nt, Homo sapiens
  source 1..20: mol_type = genomic RNA
tccaactgaagaaggtcagg

SEQ ID NO: 8307 - RNA, 20 nt, Homo sapiens
  source 1..20: mol_type = genomic RNA
ccaactgaagaaggtcaggt

SEQ ID NO: 8308 - RNA, 20 nt, Homo sapiens
  source 1..20: mol_type = genomic RNA
caactgaagaaggtcaggtc

SEQ ID NO: 8309 - RNA, 20 nt, Homo sapiens
  source 1..20: mol_type = genomic RNA
aactgaagaaggtcaggtct

SEQ ID NO: 8310 - RNA, 20 nt, Homo sapiens
  source 1..20: mol_type = genomic RNA
actgaagaaggtcaggtctg

SEQ ID NO: 8311 - RNA, 20 nt, Homo sapiens
  source 1..20: mol_type = genomic RNA
ctgaagaaggtcaggtctgt

SEQ ID NO: 8312 - RNA, 20 nt, Homo sapiens
  source 1..20: mol_type = genomic RNA
tgaagaaggtcaggtctgtc

SEQ ID NO: 8313 - RNA, 20 nt, Homo sapiens
  source 1..20: mol_type = genomic RNA
gaagaaggtcaggtctgtca

SEQ ID NO: 8314 - RNA, 20 nt, Homo sapiens
  source 1..20: mol_type = genomic RNA
aagaaggtcaggtctgtcaa

SEQ ID NO: 8315 - RNA, 20 nt, Homo sapiens
  source 1..20: mol_type = genomic RNA
agaaggtcaggtctgtcaac

SEQ ID NO: 8316 - RNA, 20 nt, Homo sapiens
  source 1..20: mol_type = genomic RNA
gaaggtcaggtctgtcaact

SEQ ID NO: 8317 - RNA, 20 nt, Homo sapiens
  source 1..20: mol_type = genomic RNA
aaggtcaggtctgtcaactc

SEQ ID NO: 8318 - RNA, 20 nt, Homo sapiens
  source 1..20: mol_type = genomic RNA
aggtcaggtctgtcaactcc

SEQ ID NO: 8319 - RNA, 20 nt, Homo sapiens
  source 1..20: mol_type = genomic RNA
ggtcaggtctgtcaactcct

SEQ ID NO: 8320 - RNA, 20 nt, Homo sapiens
  source 1..20: mol_type = genomic RNA
gtcaggtctgtcaactcctt

SEQ ID NO: 8321 - RNA, 20 nt, Homo sapiens
  source 1..20: mol_type = genomic RNA
tcaggtctgtcaactccttg

SEQ ID NO: 8322 - RNA, 20 nt, Homo sapiens
  source 1..20: mol_type = genomic RNA
caggtctgtcaactccttga

SEQ ID NO: 8323 - RNA, 20 nt, Homo sapiens
  source 1..20: mol_type = genomic RNA
aggtctgtcaactccttgat

SEQ ID NO: 8324 - RNA, 20 nt, Homo sapiens
  source 1..20: mol_type = genomic RNA
ggtctgtcaactccttgatg

SEQ ID NO: 8325 - RNA, 20 nt, Homo sapiens
  source 1..20: mol_type = genomic RNA
gtctgtcaactccttgatgg

SEQ ID NO: 8326 - RNA, 20 nt, Homo sapiens
  source 1..20: mol_type = genomic RNA
tctgtcaactccttgatggt

SEQ ID NO: 8327 - RNA, 20 nt, Homo sapiens
  source 1..20: mol_type = genomic RNA
ctgtcaactccttgatggtg

SEQ ID NO: 8328 - RNA, 20 nt, Homo sapiens
  source 1..20: mol_type = genomic RNA
tgtcaactccttgatggtgg

SEQ ID NO: 8329 - RNA, 20 nt, Homo sapiens
  source 1..20: mol_type = genomic RNA
gtcaactccttgatggtggc

SEQ ID NO: 8330 - RNA, 20 nt, Homo sapiens
  source 1..20: mol_type = genomic RNA
tcaactccttgatggtggcc

SEQ ID NO: 8331 - RNA, 20 nt, Homo sapiens
  source 1..20: mol_type = genomic RNA
caactccttgatggtggcct

SEQ ID NO: 8332 - RNA, 20 nt, Homo sapiens
  source 1..20: mol_type = genomic RNA
aactccttgatggtggcctc

SEQ ID NO: 8333 - RNA, 20 nt, Homo sapiens
  source 1..20: mol_type = genomic RNA
actccttgatggtggcctct

SEQ ID NO: 8334 - RNA, 20 nt, Homo sapiens
  source 1..20: mol_type = genomic RNA
ctccttgatggtggcctctc

SEQ ID NO: 8335 - RNA, 20 nt, Homo sapiens
  source 1..20: mol_type = genomic RNA
tccttgatggtggcctctct

SEQ ID NO: 8336 - RNA, 20 nt, Homo sapiens
  source 1..20: mol_type = genomic RNA
ccttgatggtggcctctctg

SEQ ID NO: 8337 - RNA, 20 nt, Homo sapiens
  source 1..20: mol_type = genomic RNA
cttgatggtggcctctctga

SEQ ID NO: 8338 - RNA, 20 nt, Homo sapiens
  source 1..20: mol_type = genomic RNA
ttgatggtggcctctctgac

SEQ ID NO: 8339 - RNA, 20 nt, Homo sapiens
  source 1..20: mol_type = genomic RNA
tgatggtggcctctctgact

SEQ ID NO: 8340 - RNA, 20 nt, Homo sapiens
  source 1..20: mol_type = genomic RNA
gatggtggcctctctgactt

SEQ ID NO: 8341 - RNA, 20 nt, Homo sapiens
  source 1..20: mol_type = genomic RNA
atggtggcctctctgactta

SEQ ID NO: 8342 - RNA, 20 nt, Homo sapiens
  source 1..20: mol_type = genomic RNA
tggtggcctctctgacttac

SEQ ID NO: 8343 - RNA, 20 nt, Homo sapiens
  source 1..20: mol_type = genomic RNA
ggtggcctctctgacttaca

SEQ ID NO: 8344 - RNA, 20 nt, Homo sapiens
  source 1..20: mol_type = genomic RNA
gtggcctctctgacttacaa

SEQ ID NO: 8345 - RNA, 20 nt, Homo sapiens
  source 1..20: mol_type = genomic RNA
tggcctctctgacttacaaa

SEQ ID NO: 8346 - RNA, 20 nt, Homo sapiens
  source 1..20: mol_type = genomic RNA
ggcctctctgacttacaaag

SEQ ID NO: 8347 - RNA, 20 nt, Homo sapiens
  source 1..20: mol_type = genomic RNA
gcctctctgacttacaaaga

SEQ ID NO: 8348 - RNA, 20 nt, Homo sapiens
  source 1..20: mol_type = genomic RNA
cctctctgacttacaaagac

SEQ ID NO: 8349 - RNA, 20 nt, Homo sapiens
  source 1..20: mol_type = genomic RNA
ctctctgacttacaaagaca

SEQ ID NO: 8350 - RNA, 20 nt, Homo sapiens
  source 1..20: mol_type = genomic RNA
tctctgacttacaaagacaa

SEQ ID NO: 8351 - RNA, 20 nt, Homo sapiens
  source 1..20: mol_type = genomic RNA
ctctgacttacaaagacaaa

SEQ ID NO: 8352 - RNA, 20 nt, Homo sapiens
  source 1..20: mol_type = genomic RNA
tctgacttacaaagacaaag

SEQ ID NO: 8353 - RNA, 20 nt, Homo sapiens
  source 1..20: mol_type = genomic RNA
ctgacttacaaagacaaagt

SEQ ID NO: 8354 - RNA, 20 nt, Homo sapiens
  source 1..20: mol_type = genomic RNA
tgacttacaaagacaaagtc

SEQ ID NO: 8355 - RNA, 20 nt, Homo sapiens
  source 1..20: mol_type = genomic RNA
gacttacaaagacaaagtct

SEQ ID NO: 8356 - RNA, 20 nt, Homo sapiens
  source 1..20: mol_type = genomic RNA
acttacaaagacaaagtcta

SEQ ID NO: 8357 - RNA, 20 nt, Homo sapiens
  source 1..20: mol_type = genomic RNA
cttacaaagacaaagtctac

SEQ ID NO: 8358 - RNA, 20 nt, Homo sapiens
  source 1..20: mol_type = genomic RNA
ttacaaagacaaagtctact

SEQ ID NO: 8359 - RNA, 20 nt, Homo sapiens
  source 1..20: mol_type = genomic RNA
tacaaagacaaagtctactt

SEQ ID NO: 8360 - RNA, 20 nt, Homo sapiens
  source 1..20: mol_type = genomic RNA
acaaagacaaagtctacttg

SEQ ID NO: 8361 - RNA, 20 nt, Homo sapiens
  source 1..20: mol_type = genomic RNA
caaagacaaagtctacttga

SEQ ID NO: 8362 - RNA, 20 nt, Homo sapiens
  source 1..20: mol_type = genomic RNA
aaagacaaagtctacttgaa

SEQ ID NO: 8363 - RNA, 20 nt, Homo sapiens
  source 1..20: mol_type = genomic RNA
aagacaaagtctacttgaat

SEQ ID NO: 8364 - RNA, 20 nt, Homo sapiens
  source 1..20: mol_type = genomic RNA
agacaaagtctacttgaatg

SEQ ID NO: 8365 - RNA, 20 nt, Homo sapiens
  source 1..20: mol_type = genomic RNA
gacaaagtctacttgaatgt

SEQ ID NO: 8366 - RNA, 20 nt, Homo sapiens
  source 1..20: mol_type = genomic RNA
acaaagtctacttgaatgtg

SEQ ID NO: 8367 - RNA, 20 nt, Homo sapiens
  source 1..20: mol_type = genomic RNA
caaagtctacttgaatgtga

SEQ ID NO: 8368 - RNA, 20 nt, Homo sapiens
  source 1..20: mol_type = genomic RNA
aaagtctacttgaatgtgac

SEQ ID NO: 8369 - RNA, 20 nt, Homo sapiens
  source 1..20: mol_type = genomic RNA
aagtctacttgaatgtgacc

SEQ ID NO: 8370 - RNA, 20 nt, Homo sapiens
  source 1..20: mol_type = genomic RNA
agtctacttgaatgtgacca

SEQ ID NO: 8371 - RNA, 20 nt, Homo sapiens
  source 1..20: mol_type = genomic RNA
gtctacttgaatgtgaccac

SEQ ID NO: 8372 - RNA, 20 nt, Homo sapiens
  source 1..20: mol_type = genomic RNA
tctacttgaatgtgaccact

SEQ ID NO: 8373 - RNA, 20 nt, Homo sapiens
  source 1..20: mol_type = genomic RNA
ctacttgaatgtgaccactg

SEQ ID NO: 8374 - RNA, 20 nt, Homo sapiens
  source 1..20: mol_type = genomic RNA
tacttgaatgtgaccactga

SEQ ID NO: 8375 - RNA, 20 nt, Homo sapiens
  source 1..20: mol_type = genomic RNA
acttgaatgtgaccactgac

SEQ ID NO: 8376 - RNA, 20 nt, Homo sapiens
  source 1..20: mol_type = genomic RNA
cttgaatgtgaccactgaca

SEQ ID NO: 8377 - RNA, 20 nt, Homo sapiens
  source 1..20: mol_type = genomic RNA
ttgaatgtgaccactgacaa

SEQ ID NO: 8378 - RNA, 20 nt, Homo sapiens
  source 1..20: mol_type = genomic RNA
tgaatgtgaccactgacaat

SEQ ID NO: 8379 - RNA, 20 nt, Homo sapiens
  source 1..20: mol_type = genomic RNA
gaatgtgaccactgacaata

SEQ ID NO: 8380 - RNA, 20 nt, Homo sapiens
  source 1..20: mol_type = genomic RNA
aatgtgaccactgacaatac

SEQ ID NO: 8381 - RNA, 20 nt, Homo sapiens
  source 1..20: mol_type = genomic RNA
atgtgaccactgacaatacc

SEQ ID NO: 8382 - RNA, 20 nt, Homo sapiens
  source 1..20: mol_type = genomic RNA
tgtgaccactgacaatacct

SEQ ID NO: 8383 - RNA, 20 nt, Homo sapiens
  source 1..20: mol_type = genomic RNA
gtgaccactgacaatacctc

SEQ ID NO: 8384 - RNA, 20 nt, Homo sapiens
  source 1..20: mol_type = genomic RNA
tgaccactgacaatacctcc

SEQ ID NO: 8385 - RNA, 20 nt, Homo sapiens
  source 1..20: mol_type = genomic RNA
gaccactgacaatacctccc

SEQ ID NO: 8386 - RNA, 20 nt, Homo sapiens
  source 1..20: mol_type = genomic RNA
accactgacaatacctccct

SEQ ID NO: 8387 - RNA, 20 nt, Homo sapiens
  source 1..20: mol_type = genomic RNA
ccactgacaatacctccctg

SEQ ID NO: 8388 - RNA, 20 nt, Homo sapiens
  source 1..20: mol_type = genomic RNA
cactgacaatacctccctgg

SEQ ID NO: 8389 - RNA, 20 nt, Homo sapiens
  source 1..20: mol_type = genomic RNA
actgacaatacctccctgga

SEQ ID NO: 8390 - RNA, 20 nt, Homo sapiens
  source 1..20: mol_type = genomic RNA
ctgacaatacctccctggat

SEQ ID NO: 8391 - RNA, 20 nt, Homo sapiens
  source 1..20: mol_type = genomic RNA
tgacaatacctccctggatg

SEQ ID NO: 8392 - RNA, 20 nt, Homo sapiens
  source 1..20: mol_type = genomic RNA
gacaatacctccctggatga

SEQ ID NO: 8393 - RNA, 20 nt, Homo sapiens
  source 1..20: mol_type = genomic RNA
acaatacctccctggatgac

SEQ ID NO: 8394 - RNA, 20 nt, Homo sapiens
  source 1..20: mol_type = genomic RNA
caatacctccctggatgact

SEQ ID NO: 8395 - RNA, 20 nt, Homo sapiens
  source 1..20: mol_type = genomic RNA
aatacctccctggatgactt

SEQ ID NO: 8396 - RNA, 20 nt, Homo sapiens
  source 1..20: mol_type = genomic RNA
atacctccctggatgacttc

SEQ ID NO: 8397 - RNA, 20 nt, Homo sapiens
  source 1..20: mol_type = genomic RNA
tacctccctggatgacttcc

SEQ ID NO: 8398 - RNA, 20 nt, Homo sapiens
  source 1..20: mol_type = genomic RNA
acctccctggatgacttcca

SEQ ID NO: 8399 - RNA, 20 nt, Homo sapiens
  source 1..20: mol_type = genomic RNA
cctccctggatgacttccat

SEQ ID NO: 8400 - RNA, 20 nt, Homo sapiens
  source 1..20: mol_type = genomic RNA
ctccctggatgacttccatg

SEQ ID NO: 8401 - RNA, 20 nt, Homo sapiens
  source 1..20: mol_type = genomic RNA
tccctggatgacttccatgt

SEQ ID NO: 8402 - RNA, 20 nt, Homo sapiens
  source 1..20: mol_type = genomic RNA
ccctggatgacttccatgtg

SEQ ID NO: 8403 - RNA, 20 nt, Homo sapiens
  source 1..20: mol_type = genomic RNA
cctggatgacttccatgtga

SEQ ID NO: 8404 - RNA, 20 nt, Homo sapiens
  source 1..20: mol_type = genomic RNA
ctggatgacttccatgtgaa

SEQ ID NO: 8405 - RNA, 20 nt, Homo sapiens
  source 1..20: mol_type = genomic RNA
tggatgacttccatgtgaat

SEQ ID NO: 8406 - RNA, 20 nt, Homo sapiens
  source 1..20: mol_type = genomic RNA
ggatgacttccatgtgaatg

SEQ ID NO: 8407 - RNA, 20 nt, Homo sapiens
  source 1..20: mol_type = genomic RNA
gatgacttccatgtgaatgg

SEQ ID NO: 8408 - RNA, 20 nt, Homo sapiens
  source 1..20: mol_type = genomic RNA
atgacttccatgtgaatggc

SEQ ID NO: 8409 - RNA, 20 nt, Homo sapiens
  source 1..20: mol_type = genomic RNA
tgacttccatgtgaatggcg

SEQ ID NO: 8410 - RNA, 20 nt, Homo sapiens
  source 1..20: mol_type = genomic RNA
gacttccatgtgaatggcgg

SEQ ID NO: 8411 - RNA, 20 nt, Homo sapiens
  source 1..20: mol_type = genomic RNA
acttccatgtgaatggcgga

SEQ ID NO: 8412 - RNA, 20 nt, Homo sapiens
  source 1..20: mol_type = genomic RNA
cttccatgtgaatggcggag

SEQ ID NO: 8413 - RNA, 20 nt, Homo sapiens
  source 1..20: mol_type = genomic RNA
ttccatgtgaatggcggaga

SEQ ID NO: 8414 - RNA, 20 nt, Homo sapiens
  source 1..20: mol_type = genomic RNA
tccatgtgaatggcggagaa

SEQ ID NO: 8415 - RNA, 20 nt, Homo sapiens
  source 1..20: mol_type = genomic RNA
ccatgtgaatggcggagaac

SEQ ID NO: 8416 - RNA, 20 nt, Homo sapiens
  source 1..20: mol_type = genomic RNA
catgtgaatggcggagaact

SEQ ID NO: 8417 - RNA, 20 nt, Homo sapiens
  source 1..20: mol_type = genomic RNA
atgtgaatggcggagaactg

SEQ ID NO: 8418 - RNA, 20 nt, Homo sapiens
  source 1..20: mol_type = genomic RNA
tgtgaatggcggagaactga

SEQ ID NO: 8419 - RNA, 20 nt, Homo sapiens
  source 1..20: mol_type = genomic RNA
gtgaatggcggagaactgat

SEQ ID NO: 8420 - RNA, 20 nt, Homo sapiens
  source 1..20: mol_type = genomic RNA
tgaatggcggagaactgatt

SEQ ID NO: 8421 - RNA, 20 nt, Homo sapiens
  source 1..20: mol_type = genomic RNA
gaatggcggagaactgattc

SEQ ID NO: 8422 - RNA, 20 nt, Homo sapiens
  source 1..20: mol_type = genomic RNA
aatggcggagaactgattct

SEQ ID NO: 8423 - RNA, 20 nt, Homo sapiens
  source 1..20: mol_type = genomic RNA
atggcggagaactgattctt

SEQ ID NO: 8424 - RNA, 20 nt, Homo sapiens
  source 1..20: mol_type = genomic RNA
tggcggagaactgattctta

SEQ ID NO: 8425 - RNA, 20 nt, Homo sapiens
  source 1..20: mol_type = genomic RNA
ggcggagaactgattcttat

SEQ ID NO: 8426 - RNA, 20 nt, Homo sapiens
  source 1..20: mol_type = genomic RNA
gcggagaactgattcttatc

SEQ ID NO: 8427 - RNA, 20 nt, Homo sapiens
  source 1..20: mol_type = genomic RNA
cggagaactgattcttatcc

SEQ ID NO: 8428 - RNA, 20 nt, Homo sapiens
  source 1..20: mol_type = genomic RNA
ggagaactgattcttatcca

SEQ ID NO: 8429 - RNA, 20 nt, Homo sapiens
  source 1..20: mol_type = genomic RNA
gagaactgattcttatccat

SEQ ID NO: 8430 - RNA, 20 nt, Homo sapiens
  source 1..20: mol_type = genomic RNA
agaactgattcttatccatc

SEQ ID NO: 8431 - RNA, 20 nt, Homo sapiens
  source 1..20: mol_type = genomic RNA
gaactgattcttatccatca

SEQ ID NO: 8432 - RNA, 20 nt, Homo sapiens
  source 1..20: mol_type = genomic RNA
aactgattcttatccatcaa

SEQ ID NO: 8433 - RNA, 20 nt, Homo sapiens
  source 1..20: mol_type = genomic RNA
actgattcttatccatcaaa

SEQ ID NO: 8434 - RNA, 20 nt, Homo sapiens
  source 1..20: mol_type = genomic RNA
ctgattcttatccatcaaaa

SEQ ID NO: 8435 - RNA, 20 nt, Homo sapiens
  source 1..20: mol_type = genomic RNA
tgattcttatccatcaaaat

SEQ ID NO: 8436 - RNA, 20 nt, Homo sapiens
  source 1..20: mol_type = genomic RNA
gattcttatccatcaaaatc

SEQ ID NO: 8437 - RNA, 20 nt, Homo sapiens
  source 1..20: mol_type = genomic RNA
attcttatccatcaaaatcc

SEQ ID NO: 8438 - RNA, 20 nt, Homo sapiens
  source 1..20: mol_type = genomic RNA
ttcttatccatcaaaatcct

SEQ ID NO: 8439 - RNA, 20 nt, Homo sapiens
  source 1..20: mol_type = genomic RNA
tcttatccatcaaaatcctg

SEQ ID NO: 8440 - RNA, 20 nt, Homo sapiens
  source 1..20: mol_type = genomic RNA
cttatccatcaaaatcctgg

SEQ ID NO: 8441 - RNA, 20 nt, Homo sapiens
  source 1..20: mol_type = genomic RNA
ttatccatcaaaatcctggt

SEQ ID NO: 8442 - RNA, 20 nt, Homo sapiens
  source 1..20: mol_type = genomic RNA
tatccatcaaaatcctggtg

SEQ ID NO: 8443 - RNA, 20 nt, Homo sapiens
  source 1..20: mol_type = genomic RNA
atccatcaaaatcctggtga

SEQ ID NO: 8444 - RNA, 20 nt, Homo sapiens
  source 1..20: mol_type = genomic RNA
tccatcaaaatcctggtgaa

SEQ ID NO: 8445 - RNA, 20 nt, Homo sapiens
  source 1..20: mol_type = genomic RNA
ccatcaaaatcctggtgaat

SEQ ID NO: 8446 - RNA, 20 nt, Homo sapiens
  source 1..20: mol_type = genomic RNA
catcaaaatcctggtgaatt

SEQ ID NO: 8447 - RNA, 20 nt, Homo sapiens
  source 1..20: mol_type = genomic RNA
atcaaaatcctggtgaattc

SEQ ID NO: 8448 - RNA, 20 nt, Homo sapiens
  source 1..20: mol_type = genomic RNA
tcaaaatcctggtgaattct

SEQ ID NO: 8449 - RNA, 20 nt, Homo sapiens
  source 1..20: mol_type = genomic RNA
caaaatcctggtgaattctg

SEQ ID NO: 8450 - RNA, 20 nt, Homo sapiens
  source 1..20: mol_type = genomic RNA
aaaatcctggtgaattctgt

SEQ ID NO: 8451 - RNA, 20 nt, Homo sapiens
  source 1..20: mol_type = genomic RNA
aaatcctggtgaattctgtg

SEQ ID NO: 8452 - RNA, 20 nt, Homo sapiens
  source 1..20: mol_type = genomic RNA
aatcctggtgaattctgtgt

SEQ ID NO: 8453 - RNA, 20 nt, Homo sapiens
  source 1..20: mol_type = genomic RNA
atcctggtgaattctgtgtc

SEQ ID NO: 8454 - RNA, 20 nt, Homo sapiens
  source 1..20: mol_type = genomic RNA
tcctggtgaattctgtgtcc

SEQ ID NO: 8455 - RNA, 20 nt, Homo sapiens
  source 1..20: mol_type = genomic RNA
cctggtgaattctgtgtcct

SEQ ID NO: 8456 - RNA, 20 nt, Homo sapiens
  source 1..20: mol_type = genomic RNA
ctggtgaattctgtgtcctt

SEQ ID NO: 8457 - RNA, 20 nt, Homo sapiens
  source 1..20: mol_type = genomic RNA
tggtgaattctgtgtccttt

SEQ ID NO: 8458 - RNA, 20 nt, Homo sapiens
  source 1..20: mol_type = genomic RNA
ggtgaattctgtgtcctttg

SEQ ID NO: 8459 - RNA, 20 nt, Homo sapiens
  source 1..20: mol_type = genomic RNA
gtgaattctgtgtcctttga

SEQ ID NO: 8460 - RNA, 20 nt, Homo sapiens
  source 1..20: mol_type = genomic RNA
tgaattctgtgtcctttgag

SEQ ID NO: 8461 - RNA, 20 nt, Homo sapiens
  source 1..20: mol_type = genomic RNA
gaattctgtgtcctttgagg

SEQ ID NO: 8462 - RNA, 20 nt, Homo sapiens
  source 1..20: mol_type = genomic RNA
aattctgtgtcctttgaggg

SEQ ID NO: 8463 - RNA, 20 nt, Homo sapiens
  source 1..20: mol_type = genomic RNA
attctgtgtcctttgagggg

SEQ ID NO: 8464 - RNA, 20 nt, Homo sapiens
  source 1..20: mol_type = genomic RNA
ttctgtgtcctttgaggggc

SEQ ID NO: 8465 - RNA, 20 nt, Homo sapiens
  source 1..20: mol_type = genomic RNA
tctgtgtcctttgaggggct

SEQ ID NO: 8466 - RNA, 20 nt, Homo sapiens
  source 1..20: mol_type = genomic RNA
ctgtgtcctttgaggggctg

SEQ ID NO: 8467 - RNA, 20 nt, Homo sapiens
  source 1..20: mol_type = genomic RNA
tgtgtcctttgaggggctga

SEQ ID NO: 8468 - RNA, 20 nt, Homo sapiens
  source 1..20: mol_type = genomic RNA
gtgtcctttgaggggctgat

SEQ ID NO: 8469 - RNA, 20 nt, Homo sapiens
  source 1..20: mol_type = genomic RNA
tgtcctttgaggggctgatg

SEQ ID NO: 8470 - RNA, 20 nt, Homo sapiens
  source 1..20: mol_type = genomic RNA
gtcctttgaggggctgatgg

SEQ ID NO: 8471 - RNA, 20 nt, Homo sapiens
  source 1..20: mol_type = genomic RNA
tcctttgaggggctgatggc

SEQ ID NO: 8472 - RNA, 20 nt, Homo sapiens
  source 1..20: mol_type = genomic RNA
cctttgaggggctgatggca

SEQ ID NO: 8473 - RNA, 20 nt, Homo sapiens
  source 1..20: mol_type = genomic RNA
ctttgaggggctgatggcaa

SEQ ID NO: 8474 - RNA, 20 nt, Homo sapiens
  source 1..20: mol_type = genomic RNA
tttgaggggctgatggcaat

SEQ ID NO: 8475 - RNA, 20 nt, Homo sapiens
  source 1..20: mol_type = genomic RNA
ttgaggggctgatggcaata

SEQ ID NO: 8476 - RNA, 20 nt, Homo sapiens
  source 1..20: mol_type = genomic RNA
tgaggggctgatggcaatat

SEQ ID NO: 8477 - RNA, 20 nt, Homo sapiens
  source 1..20: mol_type = genomic RNA
gaggggctgatggcaatatc

SEQ ID NO: 8478 - RNA, 20 nt, Homo sapiens
  source 1..20: mol_type = genomic RNA
aggggctgatggcaatatct

SEQ ID NO: 8479 - RNA, 20 nt, Homo sapiens
  source 1..20: mol_type = genomic RNA
ggggctgatggcaatatcta

SEQ ID NO: 8480 - RNA, 20 nt, Homo sapiens
  source 1..20: mol_type = genomic RNA
gggctgatggcaatatctaa

SEQ ID NO: 8481 - RNA, 20 nt, Homo sapiens
  source 1..20: mol_type = genomic RNA
ggctgatggcaatatctaaa

SEQ ID NO: 8482 - RNA, 20 nt, Homo sapiens
  source 1..20: mol_type = genomic RNA
gctgatggcaatatctaaaa

SEQ ID NO: 8483 - RNA, 20 nt, Homo sapiens
  source 1..20: mol_type = genomic RNA
ctgatggcaatatctaaaac

SEQ ID NO: 8484 - RNA, 20 nt, Homo sapiens
  source 1..20: mol_type = genomic RNA
tgatggcaatatctaaaacc

SEQ ID NO: 8485 - RNA, 20 nt, Homo sapiens
  source 1..20: mol_type = genomic RNA
gatggcaatatctaaaacca

SEQ ID NO: 8486 - RNA, 20 nt, Homo sapiens
  source 1..20: mol_type = genomic RNA
atggcaatatctaaaaccag

SEQ ID NO: 8487 - RNA, 20 nt, Homo sapiens
  source 1..20: mol_type = genomic RNA
tggcaatatctaaaaccagg

SEQ ID NO: 8488 - RNA, 20 nt, Homo sapiens
  source 1..20: mol_type = genomic RNA
ggcaatatctaaaaccaggc

SEQ ID NO: 8489 - RNA, 20 nt, Homo sapiens
  source 1..20: mol_type = genomic RNA
gcaatatctaaaaccaggca

SEQ ID NO: 8490 - RNA, 20 nt, Homo sapiens
  source 1..20: mol_type = genomic RNA
caatatctaaaaccaggcac

SEQ ID NO: 8491 - RNA, 20 nt, Homo sapiens
  source 1..20: mol_type = genomic RNA
aatatctaaaaccaggcacc

SEQ ID NO: 8492 - RNA, 20 nt, Homo sapiens
  source 1..20: mol_type = genomic RNA
atatctaaaaccaggcacca

SEQ ID NO: 8493 - RNA, 20 nt, Homo sapiens
  source 1..20: mol_type = genomic RNA
tatctaaaaccaggcaccag

SEQ ID NO: 8494 - RNA, 20 nt, Homo sapiens
  source 1..20: mol_type = genomic RNA
atctaaaaccaggcaccagc

SEQ ID NO: 8495 - RNA, 20 nt, Homo sapiens
  source 1..20: mol_type = genomic RNA
tctaaaaccaggcaccagca

SEQ ID NO: 8496 - RNA, 20 nt, Homo sapiens
  source 1..20: mol_type = genomic RNA
ctaaaaccaggcaccagcat

SEQ ID NO: 8497 - RNA, 20 nt, Homo sapiens
  source 1..20: mol_type = genomic RNA
taaaaccaggcaccagcatg

SEQ ID NO: 8498 - RNA, 20 nt, Homo sapiens
  source 1..20: mol_type = genomic RNA
aaaaccaggcaccagcatga

SEQ ID NO: 8499 - RNA, 20 nt, Homo sapiens
  source 1..20: mol_type = genomic RNA
aaaccaggcaccagcatgaa

SEQ ID NO: 8500 - RNA, 20 nt, Homo sapiens
  source 1..20: mol_type = genomic RNA
aaccaggcaccagcatgaac

SEQ ID NO: 8501 - RNA, 20 nt, Homo sapiens
  source 1..20: mol_type = genomic RNA
accaggcaccagcatgaaca

SEQ ID NO: 8502 - RNA, 20 nt, Homo sapiens
  source 1..20: mol_type = genomic RNA
ccaggcaccagcatgaacac

SEQ ID NO: 8503 - RNA, 20 nt, Homo sapiens
  source 1..20: mol_type = genomic RNA
caggcaccagcatgaacacc

SEQ ID NO: 8504 - RNA, 20 nt, Homo sapiens
  source 1..20: mol_type = genomic RNA
aggcaccagcatgaacacca

SEQ ID NO: 8505 - RNA, 20 nt, Homo sapiens
  source 1..20: mol_type = genomic RNA
ggcaccagcatgaacaccaa

SEQ ID NO: 8506 - RNA, 20 nt, Homo sapiens
  source 1..20: mol_type = genomic RNA
gcaccagcatgaacaccaag

SEQ ID NO: 8507 - RNA, 20 nt, Homo sapiens
  source 1..20: mol_type = genomic RNA
caccagcatgaacaccaagc

SEQ ID NO: 8508 - RNA, 20 nt, Homo sapiens
  source 1..20: mol_type = genomic RNA
accagcatgaacaccaagct

SEQ ID NO: 8509 - RNA, 20 nt, Homo sapiens
  source 1..20: mol_type = genomic RNA
ccagcatgaacaccaagctg

SEQ ID NO: 8510 - RNA, 20 nt, Homo sapiens
  source 1..20: mol_type = genomic RNA
cagcatgaacaccaagctgg

SEQ ID NO: 8511 - RNA, 20 nt, Homo sapiens
  source 1..20: mol_type = genomic RNA
agcatgaacaccaagctggg

SEQ ID NO: 8512 - RNA, 20 nt, Homo sapiens
  source 1..20: mol_type = genomic RNA
gcatgaacaccaagctgggg

SEQ ID NO: 8513 - RNA, 20 nt, Homo sapiens
  source 1..20: mol_type = genomic RNA
catgaacaccaagctggggg

SEQ ID NO: 8514 - RNA, 20 nt, Homo sapiens
  source 1..20: mol_type = genomic RNA
atgaacaccaagctgggggt

SEQ ID NO: 8515 - RNA, 20 nt, Homo sapiens
  source 1..20: mol_type = genomic RNA
tgaacaccaagctgggggtg

SEQ ID NO: 8516 - RNA, 20 nt, Homo sapiens
  source 1..20: mol_type = genomic RNA
gaacaccaagctgggggtgg

SEQ ID NO: 8517 - RNA, 20 nt, Homo sapiens
  source 1..20: mol_type = genomic RNA
aacaccaagctgggggtgga

SEQ ID NO: 8518 - RNA, 20 nt, Homo sapiens
  source 1..20: mol_type = genomic RNA
acaccaagctgggggtggac

SEQ ID NO: 8519 - RNA, 20 nt, Homo sapiens
  source 1..20: mol_type = genomic RNA
caccaagctgggggtggaca

SEQ ID NO: 8520 - RNA, 20 nt, Homo sapiens
  source 1..20: mol_type = genomic RNA
accaagctgggggtggacag

SEQ ID NO: 8521 - RNA, 20 nt, Homo sapiens
  source 1..20: mol_type = genomic RNA
ccaagctgggggtggacagg

SEQ ID NO: 8522 - RNA, 20 nt, Homo sapiens
  source 1..20: mol_type = genomic RNA
caagctgggggtggacaggg

SEQ ID NO: 8523 - RNA, 20 nt, Homo sapiens
  source 1..20: mol_type = genomic RNA
aagctgggggtggacagggc

SEQ ID NO: 8524 - RNA, 20 nt, Homo sapiens
  source 1..20: mol_type = genomic RNA
agctgggggtggacagggca

SEQ ID NO: 8525 - RNA, 20 nt, Homo sapiens
  source 1..20: mol_type = genomic RNA
gctgggggtggacagggcat

SEQ ID NO: 8526 - RNA, 20 nt, Homo sapiens
  source 1..20: mol_type = genomic RNA
ctgggggtggacagggcatg

SEQ ID NO: 8527 - RNA, 20 nt, Homo sapiens
  source 1..20: mol_type = genomic RNA
tgggggtggacagggcatgg

SEQ ID NO: 8528 - RNA, 20 nt, Homo sapiens
  source 1..20: mol_type = genomic RNA
gggggtggacagggcatgga

SEQ ID NO: 8529 - RNA, 20 nt, Homo sapiens
  source 1..20: mol_type = genomic RNA
ggggtggacagggcatggat

SEQ ID NO: 8530 - RNA, 20 nt, Homo sapiens
  source 1..20: mol_type = genomic RNA
gggtggacagggcatggatt

SEQ ID NO: 8531 - RNA, 20 nt, Homo sapiens
  source 1..20: mol_type = genomic RNA
ggtggacagggcatggattc

SEQ ID NO: 8532 - RNA, 20 nt, Homo sapiens
  source 1..20: mol_type = genomic RNA
gtggacagggcatggattct

SEQ ID NO: 8533 - RNA, 20 nt, Homo sapiens
  source 1..20: mol_type = genomic RNA
tggacagggcatggattctt

SEQ ID NO: 8534 - RNA, 20 nt, Homo sapiens
  source 1..20: mol_type = genomic RNA
ggacagggcatggattcttc

SEQ ID NO: 8535 - RNA, 20 nt, Homo sapiens
  source 1..20: mol_type = genomic RNA
gacagggcatggattcttca

SEQ ID NO: 8536 - RNA, 20 nt, Homo sapiens
  source 1..20: mol_type = genomic RNA
acagggcatggattcttcat

SEQ ID NO: 8537 - RNA, 20 nt, Homo sapiens
  source 1..20: mol_type = genomic RNA
cagggcatggattcttcatt

SEQ ID NO: 8538 - RNA, 20 nt, Homo sapiens
  source 1..20: mol_type = genomic RNA
agggcatggattcttcattg

SEQ ID NO: 8539 - RNA, 20 nt, Homo sapiens
  source 1..20: mol_type = genomic RNA
gggcatggattcttcattgc

SEQ ID NO: 8540 - RNA, 20 nt, Homo sapiens
  source 1..20: mol_type = genomic RNA
ggcatggattcttcattgca

SEQ ID NO: 8541 - RNA, 20 nt, Homo sapiens
  source 1..20: mol_type = genomic RNA
gcatggattcttcattgcaa

SEQ ID NO: 8542 - RNA, 20 nt, Homo sapiens
  source 1..20: mol_type = genomic RNA
catggattcttcattgcaag

SEQ ID NO: 8543 - RNA, 20 nt, Homo sapiens
  source 1..20: mol_type = genomic RNA
atggattcttcattgcaagt

SEQ ID NO: 8544 - RNA, 20 nt, Homo sapiens
  source 1..20: mol_type = genomic RNA
tggattcttcattgcaagtg

SEQ ID NO: 8545 - RNA, 20 nt, Homo sapiens
  source 1..20: mol_type = genomic RNA
ggattcttcattgcaagtga

SEQ ID NO: 8546 - RNA, 20 nt, Homo sapiens
  source 1..20: mol_type = genomic RNA
gattcttcattgcaagtgaa

SEQ ID NO: 8547 - RNA, 20 nt, Homo sapiens
  source 1..20: mol_type = genomic RNA
attcttcattgcaagtgaag

SEQ ID NO: 8548 - RNA, 20 nt, Homo sapiens
  source 1..20: mol_type = genomic RNA
ttcttcattgcaagtgaagg

SEQ ID NO: 8549 - RNA, 20 nt, Homo sapiens
  source 1..20: mol_type = genomic RNA
tcttcattgcaagtgaagga

SEQ ID NO: 8550 - RNA, 20 nt, Homo sapiens
  source 1..20: mol_type = genomic RNA
cttcattgcaagtgaaggag

SEQ ID NO: 8551 - RNA, 20 nt, Homo sapiens
  source 1..20: mol_type = genomic RNA
ttcattgcaagtgaaggagc

SEQ ID NO: 8552 - RNA, 20 nt, Homo sapiens
  source 1..20: mol_type = genomic RNA
tcattgcaagtgaaggagcc

SEQ ID NO: 8553 - RNA, 20 nt, Homo sapiens
  source 1..20: mol_type = genomic RNA
cattgcaagtgaaggagcct

SEQ ID NO: 8554 - RNA, 20 nt, Homo sapiens
  source 1..20: mol_type = genomic RNA
attgcaagtgaaggagcctc

SEQ ID NO: 8555 - RNA, 20 nt, Homo sapiens
  source 1..20: mol_type = genomic RNA
ttgcaagtgaaggagcctcc

SEQ ID NO: 8556 - RNA, 20 nt, Homo sapiens
  source 1..20: mol_type = genomic RNA
tgcaagtgaaggagcctccc

SEQ ID NO: 8557 - RNA, 20 nt, Homo sapiens
  source 1..20: mol_type = genomic RNA
gcaagtgaaggagcctccca

SEQ ID NO: 8558 - RNA, 20 nt, Homo sapiens
  source 1..20: mol_type = genomic RNA
caagtgaaggagcctcccag

SEQ ID NO: 8559 - RNA, 20 nt, Homo sapiens
  source 1..20: mol_type = genomic RNA
aagtgaaggagcctcccagc

SEQ ID NO: 8560 - RNA, 20 nt, Homo sapiens
  source 1..20: mol_type = genomic RNA
agtgaaggagcctcccagct

SEQ ID NO: 8561 - RNA, 20 nt, Homo sapiens
  source 1..20: mol_type = genomic RNA
gtgaaggagcctcccagctc

SEQ ID NO: 8562 - RNA, 20 nt, Homo sapiens
  source 1..20: mol_type = genomic RNA
tgaaggagcctcccagctca

SEQ ID NO: 8563 - RNA, 20 nt, Homo sapiens
  source 1..20: mol_type = genomic RNA
gaaggagcctcccagctcag

SEQ ID NO: 8564 - RNA, 20 nt, Homo sapiens
  source 1..20: mol_type = genomic RNA
aaggagcctcccagctcagc

SEQ ID NO: 8565 - RNA, 20 nt, Homo sapiens
  source 1..20: mol_type = genomic RNA
aggagcctcccagctcagcc

SEQ ID NO: 8566 - RNA, 20 nt, Homo sapiens
  source 1..20: mol_type = genomic RNA
ggagcctcccagctcagcca

SEQ ID NO: 8567 - RNA, 20 nt, Homo sapiens
  source 1..20: mol_type = genomic RNA
gagcctcccagctcagccac

SEQ ID NO: 8568 - RNA, 20 nt, Homo sapiens
  source 1..20: mol_type = genomic RNA
agcctcccagctcagccacg

SEQ ID NO: 8569 - RNA, 20 nt, Homo sapiens
  source 1..20: mol_type = genomic RNA
gcctcccagctcagccacgt

SEQ ID NO: 8570 - RNA, 20 nt, Homo sapiens
  source 1..20: mol_type = genomic RNA
cctcccagctcagccacgtg

SEQ ID NO: 8571 - RNA, 20 nt, Homo sapiens
  source 1..20: mol_type = genomic RNA
ctcccagctcagccacgtgg

SEQ ID NO: 8572 - RNA, 20 nt, Homo sapiens
  source 1..20: mol_type = genomic RNA
tcccagctcagccacgtggg

SEQ ID NO: 8573 - RNA, 20 nt, Homo sapiens
  source 1..20: mol_type = genomic RNA
cccagctcagccacgtggga

SEQ ID NO: 8574 - RNA, 20 nt, Homo sapiens
  source 1..20: mol_type = genomic RNA
ccagctcagccacgtgggat

SEQ ID NO: 8575 - RNA, 20 nt, Homo sapiens
  source 1..20: mol_type = genomic RNA
cagctcagccacgtgggatg

SEQ ID NO: 8576 - RNA, 20 nt, Homo sapiens
  source 1..20: mol_type = genomic RNA
agctcagccacgtgggatgt

SEQ ID NO: 8577 - RNA, 20 nt, Homo sapiens
  source 1..20: mol_type = genomic RNA
gctcagccacgtgggatgtg

SEQ ID NO: 8578 - RNA, 20 nt, Homo sapiens
  source 1..20: mol_type = genomic RNA
ctcagccacgtgggatgtga

SEQ ID NO: 8579 - RNA, 20 nt, Homo sapiens
  source 1..20: mol_type = genomic RNA
tcagccacgtgggatgtgac

SEQ ID NO: 8580 - RNA, 20 nt, Homo sapiens
  source 1..20: mol_type = genomic RNA
cagccacgtgggatgtgaca

SEQ ID NO: 8581 - RNA, 20 nt, Homo sapiens
  source 1..20: mol_type = genomic RNA
agccacgtgggatgtgacaa

SEQ ID NO: 8582 - RNA, 20 nt, Homo sapiens
  source 1..20: mol_type = genomic RNA
gccacgtgggatgtgacaag

SEQ ID NO: 8583 - RNA, 20 nt, Homo sapiens
  source 1..20: mol_type = genomic RNA
ccacgtgggatgtgacaaga

SEQ ID NO: 8584 - RNA, 20 nt, Homo sapiens
  source 1..20: mol_type = genomic RNA
cacgtgggatgtgacaagaa

SEQ ID NO: 8585 - RNA, 20 nt, Homo sapiens
  source 1..20: mol_type = genomic RNA
acgtgggatgtgacaagaag

SEQ ID NO: 8586 - RNA, 20 nt, Homo sapiens
  source 1..20: mol_type = genomic RNA
cgtgggatgtgacaagaagc

SEQ ID NO: 8587 - RNA, 20 nt, Homo sapiens
  source 1..20: mol_type = genomic RNA
gtgggatgtgacaagaagca

SEQ ID NO: 8588 - RNA, 20 nt, Homo sapiens
  source 1..20: mol_type = genomic RNA
tgggatgtgacaagaagcag

SEQ ID NO: 8589 - RNA, 20 nt, Homo sapiens
  source 1..20: mol_type = genomic RNA
gggatgtgacaagaagcaga

SEQ ID NO: 8590 - RNA, 20 nt, Homo sapiens
  source 1..20: mol_type = genomic RNA
ggatgtgacaagaagcagat

SEQ ID NO: 8591 - RNA, 20 nt, Homo sapiens
  source 1..20: mol_type = genomic RNA
gatgtgacaagaagcagatc

SEQ ID NO: 8592 - RNA, 20 nt, Homo sapiens
  source 1..20: mol_type = genomic RNA
atgtgacaagaagcagatcc

SEQ ID NO: 8593 - RNA, 20 nt, Homo sapiens
  source 1..20: mol_type = genomic RNA
tgtgacaagaagcagatcct

SEQ ID NO: 8594 - RNA, 20 nt, Homo sapiens
  source 1..20: mol_type = genomic RNA
gtgacaagaagcagatcctg

SEQ ID NO: 8595 - RNA, 20 nt, Homo sapiens
  source 1..20: mol_type = genomic RNA
tgacaagaagcagatcctgg

SEQ ID NO: 8596 - RNA, 20 nt, Homo sapiens
  source 1..20: mol_type = genomic RNA
gacaagaagcagatcctggc

SEQ ID NO: 8597 - RNA, 20 nt, Homo sapiens
  source 1..20: mol_type = genomic RNA
acaagaagcagatcctggcc

SEQ ID NO: 8598 - RNA, 20 nt, Homo sapiens
  source 1..20: mol_type = genomic RNA
caagaagcagatcctggccc

SEQ ID NO: 8599 - RNA, 20 nt, Homo sapiens
  source 1..20: mol_type = genomic RNA
aagaagcagatcctggccct

SEQ ID NO: 8600 - RNA, 20 nt, Homo sapiens
  source 1..20: mol_type = genomic RNA
agaagcagatcctggccctc

SEQ ID NO: 8601 - RNA, 20 nt, Homo sapiens
  source 1..20: mol_type = genomic RNA
gaagcagatcctggccctcc

SEQ ID NO: 8602 - RNA, 20 nt, Homo sapiens
  source 1..20: mol_type = genomic RNA
aagcagatcctggccctccc

SEQ ID NO: 8603 - RNA, 20 nt, Homo sapiens
  source 1..20: mol_type = genomic RNA
agcagatcctggccctcccg

SEQ ID NO: 8604 - RNA, 20 nt, Homo sapiens
  source 1..20: mol_type = genomic RNA
gcagatcctggccctcccgc

SEQ ID NO: 8605 - RNA, 20 nt, Homo sapiens
  source 1..20: mol_type = genomic RNA
cagatcctggccctcccgcc

SEQ ID NO: 8606 - RNA, 20 nt, Homo sapiens
  source 1..20: mol_type = genomic RNA
agatcctggccctcccgccc

SEQ ID NO: 8607 - RNA, 20 nt, Homo sapiens
  source 1..20: mol_type = genomic RNA
gatcctggccctcccgcccc

SEQ ID NO: 8608 - RNA, 20 nt, Homo sapiens
  source 1..20: mol_type = genomic RNA
atcctggccctcccgccccc

SEQ ID NO: 8609 - RNA, 20 nt, Homo sapiens
  source 1..20: mol_type = genomic RNA
tcctggccctcccgccccca

SEQ ID NO: 8610 - RNA, 20 nt, Homo sapiens
  source 1..20: mol_type = genomic RNA
cctggccctcccgcccccac

SEQ ID NO: 8611 - RNA, 20 nt, Homo sapiens
  source 1..20: mol_type = genomic RNA
ctggccctcccgcccccacc

SEQ ID NO: 8612 - RNA, 20 nt, Homo sapiens
  source 1..20: mol_type = genomic RNA
tggccctcccgcccccaccc

SEQ ID NO: 8613 - RNA, 20 nt, Homo sapiens
  source 1..20: mol_type = genomic RNA
ggccctcccgcccccacccc

SEQ ID NO: 8614 - RNA, 20 nt, Homo sapiens
  source 1..20: mol_type = genomic RNA
gccctcccgcccccacccct

SEQ ID NO: 8615 - RNA, 20 nt, Homo sapiens
  source 1..20: mol_type = genomic RNA
ccctcccgcccccacccctc

SEQ ID NO: 8616 - RNA, 20 nt, Homo sapiens
  source 1..20: mol_type = genomic RNA
cctcccgcccccacccctca

SEQ ID NO: 8617 - RNA, 20 nt, Homo sapiens
  source 1..20: mol_type = genomic RNA
ctcccgcccccacccctcag

SEQ ID NO: 8618 - RNA, 20 nt, Homo sapiens
  source 1..20: mol_type = genomic RNA
tcccgcccccacccctcagg

SEQ ID NO: 8619 - RNA, 20 nt, Homo sapiens
  source 1..20: mol_type = genomic RNA
cccgcccccacccctcaggg

SEQ ID NO: 8620 - RNA, 20 nt, Homo sapiens
  source 1..20: mol_type = genomic RNA
ccgcccccacccctcaggga

SEQ ID NO: 8621 - RNA, 20 nt, Homo sapiens
  source 1..20: mol_type = genomic RNA
cgcccccacccctcagggat

SEQ ID NO: 8622 - RNA, 20 nt, Homo sapiens
  source 1..20: mol_type = genomic RNA
gcccccacccctcagggata

SEQ ID NO: 8623 - RNA, 20 nt, Homo sapiens
  source 1..20: mol_type = genomic RNA
cccccacccctcagggatat

SEQ ID NO: 8624 - RNA, 20 nt, Homo sapiens
  source 1..20: mol_type = genomic RNA
ccccacccctcagggatatt

SEQ ID NO: 8625 - RNA, 20 nt, Homo sapiens
  source 1..20: mol_type = genomic RNA
cccacccctcagggatattt

SEQ ID NO: 8626 - RNA, 20 nt, Homo sapiens
  source 1..20: mol_type = genomic RNA
ccacccctcagggatattta

SEQ ID NO: 8627 - RNA, 20 nt, Homo sapiens
  source 1..20: mol_type = genomic RNA
cacccctcagggatatttaa

SEQ ID NO: 8628 - RNA, 20 nt, Homo sapiens
  source 1..20: mol_type = genomic RNA
acccctcagggatatttaaa

SEQ ID NO: 8629 - RNA, 20 nt, Homo sapiens
  source 1..20: mol_type = genomic RNA
cccctcagggatatttaaaa

SEQ ID NO: 8630 - RNA, 20 nt, Homo sapiens
  source 1..20: mol_type = genomic RNA
ccctcagggatatttaaaac

SEQ ID NO: 8631 - RNA, 20 nt, Homo sapiens
  source 1..20: mol_type = genomic RNA
cctcagggatatttaaaact

SEQ ID NO: 8632 - RNA, 20 nt, Homo sapiens
  source 1..20: mol_type = genomic RNA
ctcagggatatttaaaactt

SEQ ID NO: 8633 - RNA, 20 nt, Homo sapiens
  source 1..20: mol_type = genomic RNA
tcagggatatttaaaactta

SEQ ID NO: 8634 - RNA, 20 nt, Homo sapiens
  source 1..20: mol_type = genomic RNA
cagggatatttaaaacttat

SEQ ID NO: 8635 - RNA, 20 nt, Homo sapiens
  source 1..20: mol_type = genomic RNA
agggatatttaaaacttatt

SEQ ID NO: 8636 - RNA, 20 nt, Homo sapiens
  source 1..20: mol_type = genomic RNA
gggatatttaaaacttattt

SEQ ID NO: 8637 - RNA, 20 nt, Homo sapiens
  source 1..20: mol_type = genomic RNA
ggatatttaaaacttatttt

SEQ ID NO: 8638 - RNA, 20 nt, Homo sapiens
  source 1..20: mol_type = genomic RNA
gatatttaaaacttatttta

SEQ ID NO: 8639 - RNA, 20 nt, Homo sapiens
  source 1..20: mol_type = genomic RNA
atatttaaaacttattttat

SEQ ID NO: 8640 - RNA, 20 nt, Homo sapiens
  source 1..20: mol_type = genomic RNA
tatttaaaacttattttata

SEQ ID NO: 8641 - RNA, 20 nt, Homo sapiens
  source 1..20: mol_type = genomic RNA
atttaaaacttattttatat

SEQ ID NO: 8642 - RNA, 20 nt, Homo sapiens
  source 1..20: mol_type = genomic RNA
tttaaaacttattttatata

SEQ ID NO: 8643 - RNA, 20 nt, Homo sapiens
  source 1..20: mol_type = genomic RNA
ttaaaacttattttatatac

SEQ ID NO: 8644 - RNA, 20 nt, Homo sapiens
  source 1..20: mol_type = genomic RNA
taaaacttattttatatacc

SEQ ID NO: 8645 - RNA, 20 nt, Homo sapiens
  source 1..20: mol_type = genomic RNA
aaaacttattttatatacca

SEQ ID NO: 8646 - RNA, 20 nt, Homo sapiens
  source 1..20: mol_type = genomic RNA
aaacttattttatataccag

SEQ ID NO: 8647 - RNA, 20 nt, Homo sapiens
  source 1..20: mol_type = genomic RNA
aacttattttatataccagt

SEQ ID NO: 8648 - RNA, 20 nt, Homo sapiens
  source 1..20: mol_type = genomic RNA
acttattttatataccagtt

SEQ ID NO: 8649 - RNA, 20 nt, Homo sapiens
  source 1..20: mol_type = genomic RNA
cttattttatataccagtta

SEQ ID NO: 8650 - RNA, 20 nt, Homo sapiens
  source 1..20: mol_type = genomic RNA
ttattttatataccagttaa

SEQ ID NO: 8651 - RNA, 20 nt, Homo sapiens
  source 1..20: mol_type = genomic RNA
tattttatataccagttaat

SEQ ID NO: 8652 - RNA, 20 nt, Homo sapiens
  source 1..20: mol_type = genomic RNA
attttatataccagttaatc

SEQ ID NO: 8653 - RNA, 20 nt, Homo sapiens
  source 1..20: mol_type = genomic RNA
ttttatataccagttaatct

SEQ ID NO: 8654 - RNA, 20 nt, Homo sapiens
  source 1..20: mol_type = genomic RNA
tttatataccagttaatctt

SEQ ID NO: 8655 - RNA, 20 nt, Homo sapiens
  source 1..20: mol_type = genomic RNA
ttatataccagttaatctta

SEQ ID NO: 8656 - RNA, 20 nt, Homo sapiens
  source 1..20: mol_type = genomic RNA
tatataccagttaatcttat

SEQ ID NO: 8657 - RNA, 20 nt, Homo sapiens
  source 1..20: mol_type = genomic RNA
atataccagttaatcttatt

SEQ ID NO: 8658 - RNA, 20 nt, Homo sapiens
  source 1..20: mol_type = genomic RNA
tataccagttaatcttattt

SEQ ID NO: 8659 - RNA, 20 nt, Homo sapiens
  source 1..20: mol_type = genomic RNA
ataccagttaatcttattta

SEQ ID NO: 8660 - RNA, 20 nt, Homo sapiens
  source 1..20: mol_type = genomic RNA
taccagttaatcttatttat

SEQ ID NO: 8661 - RNA, 20 nt, Homo sapiens
  source 1..20: mol_type = genomic RNA
accagttaatcttatttatc

SEQ ID NO: 8662 - RNA, 20 nt, Homo sapiens
  source 1..20: mol_type = genomic RNA
ccagttaatcttatttatcc

SEQ ID NO: 8663 - RNA, 20 nt, Homo sapiens
  source 1..20: mol_type = genomic RNA
cagttaatcttatttatcct

SEQ ID NO: 8664 - RNA, 20 nt, Homo sapiens
  source 1..20: mol_type = genomic RNA
agttaatcttatttatcctt

SEQ ID NO: 8665 - RNA, 20 nt, Homo sapiens
  source 1..20: mol_type = genomic RNA
gttaatcttatttatcctta

SEQ ID NO: 8666 - RNA, 20 nt, Homo sapiens
  source 1..20: mol_type = genomic RNA
ttaatcttatttatccttat

SEQ ID NO: 8667 - RNA, 20 nt, Homo sapiens
  source 1..20: mol_type = genomic RNA
taatcttatttatccttata

SEQ ID NO: 8668 - RNA, 20 nt, Homo sapiens
  source 1..20: mol_type = genomic RNA
aatcttatttatccttatat

SEQ ID NO: 8669 - RNA, 20 nt, Homo sapiens
  source 1..20: mol_type = genomic RNA
atcttatttatccttatatt

SEQ ID NO: 8670 - RNA, 20 nt, Homo sapiens
  source 1..20: mol_type = genomic RNA
tcttatttatccttatattt

SEQ ID NO: 8671 - RNA, 20 nt, Homo sapiens
  source 1..20: mol_type = genomic RNA
cttatttatccttatatttt

SEQ ID NO: 8672 - RNA, 20 nt, Homo sapiens
  source 1..20: mol_type = genomic RNA
ttatttatccttatattttc

SEQ ID NO: 8673 - RNA, 20 nt, Homo sapiens
  source 1..20: mol_type = genomic RNA
tatttatccttatattttct

SEQ ID NO: 8674 - RNA, 20 nt, Homo sapiens
  source 1..20: mol_type = genomic RNA
atttatccttatattttcta

SEQ ID NO: 8675 - RNA, 20 nt, Homo sapiens
  source 1..20: mol_type = genomic RNA
tttatccttatattttctaa

SEQ ID NO: 8676 - RNA, 20 nt, Homo sapiens
  source 1..20: mol_type = genomic RNA
ttatccttatattttctaaa

SEQ ID NO: 8677 - RNA, 20 nt, Homo sapiens
  source 1..20: mol_type = genomic RNA
tatccttatattttctaaat

SEQ ID NO: 8678 - RNA, 20 nt, Homo sapiens
  source 1..20: mol_type = genomic RNA
atccttatattttctaaatt

SEQ ID NO: 8679 - RNA, 20 nt, Homo sapiens
  source 1..20: mol_type = genomic RNA
tccttatattttctaaattg

SEQ ID NO: 8680 - RNA, 20 nt, Homo sapiens
  source 1..20: mol_type = genomic RNA
ccttatattttctaaattgc

SEQ ID NO: 8681 - RNA, 20 nt, Homo sapiens
  source 1..20: mol_type = genomic RNA
cttatattttctaaattgcc

SEQ ID NO: 8682 - RNA, 20 nt, Homo sapiens
  source 1..20: mol_type = genomic RNA
ttatattttctaaattgcct

SEQ ID NO: 8683 - RNA, 20 nt, Homo sapiens
  source 1..20: mol_type = genomic RNA
tatattttctaaattgccta

SEQ ID NO: 8684 - RNA, 20 nt, Homo sapiens
  source 1..20: mol_type = genomic RNA
atattttctaaattgcctag

SEQ ID NO: 8685 - RNA, 20 nt, Homo sapiens
  source 1..20: mol_type = genomic RNA
tattttctaaattgcctagc

SEQ ID NO: 8686 - RNA, 20 nt, Homo sapiens
  source 1..20: mol_type = genomic RNA
attttctaaattgcctagcc

SEQ ID NO: 8687 - RNA, 20 nt, Homo sapiens
  source 1..20: mol_type = genomic RNA
ttttctaaattgcctagccg

SEQ ID NO: 8688 - RNA, 20 nt, Homo sapiens
  source 1..20: mol_type = genomic RNA
tttctaaattgcctagccgt

SEQ ID NO: 8689 - RNA, 20 nt, Homo sapiens
  source 1..20: mol_type = genomic RNA
ttctaaattgcctagccgtc

SEQ ID NO: 8690 - RNA, 20 nt, Homo sapiens
  source 1..20: mol_type = genomic RNA
tctaaattgcctagccgtca

SEQ ID NO: 8691 - RNA, 20 nt, Homo sapiens
  source 1..20: mol_type = genomic RNA
ctaaattgcctagccgtcac

SEQ ID NO: 8692 - RNA, 20 nt, Homo sapiens
  source 1..20: mol_type = genomic RNA
taaattgcctagccgtcaca

SEQ ID NO: 8693 - RNA, 20 nt, Homo sapiens
  source 1..20: mol_type = genomic RNA
aaattgcctagccgtcacac

SEQ ID NO: 8694 - RNA, 20 nt, Homo sapiens
  source 1..20: mol_type = genomic RNA
aattgcctagccgtcacacc

SEQ ID NO: 8695 - RNA, 20 nt, Homo sapiens
  source 1..20: mol_type = genomic RNA
attgcctagccgtcacaccc

SEQ ID NO: 8696 - RNA, 20 nt, Homo sapiens
  source 1..20: mol_type = genomic RNA
ttgcctagccgtcacacccc

SEQ ID NO: 8697 - RNA, 20 nt, Homo sapiens
  source 1..20: mol_type = genomic RNA
tgcctagccgtcacacccca

SEQ ID NO: 8698 - RNA, 20 nt, Homo sapiens
  source 1..20: mol_type = genomic RNA
gcctagccgtcacaccccaa

SEQ ID NO: 8699 - RNA, 20 nt, Homo sapiens
  source 1..20: mol_type = genomic RNA
cctagccgtcacaccccaag

SEQ ID NO: 8700 - RNA, 20 nt, Homo sapiens
  source 1..20: mol_type = genomic RNA
ctagccgtcacaccccaaga

SEQ ID NO: 8701 - RNA, 20 nt, Homo sapiens
  source 1..20: mol_type = genomic RNA
tagccgtcacaccccaagat

SEQ ID NO: 8702 - RNA, 20 nt, Homo sapiens
  source 1..20: mol_type = genomic RNA
agccgtcacaccccaagatt

SEQ ID NO: 8703 - RNA, 20 nt, Homo sapiens
  source 1..20: mol_type = genomic RNA
gccgtcacaccccaagattg

SEQ ID NO: 8704 - RNA, 20 nt, Homo sapiens
  source 1..20: mol_type = genomic RNA
ccgtcacaccccaagattgc

SEQ ID NO: 8705 - RNA, 20 nt, Homo sapiens
  source 1..20: mol_type = genomic RNA
cgtcacaccccaagattgcc

SEQ ID NO: 8706 - RNA, 20 nt, Homo sapiens
  source 1..20: mol_type = genomic RNA
gtcacaccccaagattgcct

SEQ ID NO: 8707 - RNA, 20 nt, Homo sapiens
  source 1..20: mol_type = genomic RNA
tcacaccccaagattgcctt

SEQ ID NO: 8708 - RNA, 20 nt, Homo sapiens
  source 1..20: mol_type = genomic RNA
cacaccccaagattgccttg

SEQ ID NO: 8709 - RNA, 20 nt, Homo sapiens
  source 1..20: mol_type = genomic RNA
acaccccaagattgccttga

SEQ ID NO: 8710 - RNA, 20 nt, Homo sapiens
  source 1..20: mol_type = genomic RNA
caccccaagattgccttgag

SEQ ID NO: 8711 - RNA, 20 nt, Homo sapiens
  source 1..20: mol_type = genomic RNA
accccaagattgccttgagc

SEQ ID NO: 8712 - RNA, 20 nt, Homo sapiens
  source 1..20: mol_type = genomic RNA
ccccaagattgccttgagcc

SEQ ID NO: 8713 - RNA, 20 nt, Homo sapiens
  source 1..20: mol_type = genomic RNA
cccaagattgccttgagcct

SEQ ID NO: 8714 - RNA, 20 nt, Homo sapiens
  source 1..20: mol_type = genomic RNA
ccaagattgccttgagccta

SEQ ID NO: 8715 - RNA, 20 nt, Homo sapiens
  source 1..20: mol_type = genomic RNA
caagattgccttgagcctac

SEQ ID NO: 8716 - RNA, 20 nt, Homo sapiens
  source 1..20: mol_type = genomic RNA
aagattgccttgagcctact

SEQ ID NO: 8717 - RNA, 20 nt, Homo sapiens
  source 1..20: mol_type = genomic RNA
agattgccttgagcctacta

SEQ ID NO: 8718 - RNA, 20 nt, Homo sapiens
  source 1..20: mol_type = genomic RNA
gattgccttgagcctactag

SEQ ID NO: 8719 - RNA, 20 nt, Homo sapiens
  source 1..20: mol_type = genomic RNA
attgccttgagcctactagg

SEQ ID NO: 8720 - RNA, 20 nt, Homo sapiens
  source 1..20: mol_type = genomic RNA
ttgccttgagcctactaggc

SEQ ID NO: 8721 - RNA, 20 nt, Homo sapiens
  source 1..20: mol_type = genomic RNA
tgccttgagcctactaggca

SEQ ID NO: 8722 - RNA, 20 nt, Homo sapiens
  source 1..20: mol_type = genomic RNA
gccttgagcctactaggcac

SEQ ID NO: 8723 - RNA, 20 nt, Homo sapiens
  source 1..20: mol_type = genomic RNA
ccttgagcctactaggcacc

SEQ ID NO: 8724 - RNA, 20 nt, Homo sapiens
  source 1..20: mol_type = genomic RNA
cttgagcctactaggcacct

SEQ ID NO: 8725 - RNA, 20 nt, Homo sapiens
  source 1..20: mol_type = genomic RNA
ttgagcctactaggcacctt

SEQ ID NO: 8726 - RNA, 20 nt, Homo sapiens
  source 1..20: mol_type = genomic RNA
tgagcctactaggcaccttt

SEQ ID NO: 8727 - RNA, 20 nt, Homo sapiens
  source 1..20: mol_type = genomic RNA
gagcctactaggcacctttg

SEQ ID NO: 8728 - RNA, 20 nt, Homo sapiens
  source 1..20: mol_type = genomic RNA
agcctactaggcacctttgt

SEQ ID NO: 8729 - RNA, 20 nt, Homo sapiens
  source 1..20: mol_type = genomic RNA
gcctactaggcacctttgtg

SEQ ID NO: 8730 - RNA, 20 nt, Homo sapiens
  source 1..20: mol_type = genomic RNA
cctactaggcacctttgtga

SEQ ID NO: 8731 - RNA, 20 nt, Homo sapiens
  source 1..20: mol_type = genomic RNA
ctactaggcacctttgtgag

SEQ ID NO: 8732 - RNA, 20 nt, Homo sapiens
  source 1..20: mol_type = genomic RNA
tactaggcacctttgtgaga

SEQ ID NO: 8733 - RNA, 20 nt, Homo sapiens
  source 1..20: mol_type = genomic RNA
actaggcacctttgtgagaa

SEQ ID NO: 8734 - RNA, 20 nt, Homo sapiens
  source 1..20: mol_type = genomic RNA
ctaggcacctttgtgagaaa

SEQ ID NO: 8735 - RNA, 20 nt, Homo sapiens
  source 1..20: mol_type = genomic RNA
taggcacctttgtgagaaag

SEQ ID NO: 8736 - RNA, 20 nt, Homo sapiens
  source 1..20: mol_type = genomic RNA
aggcacctttgtgagaaaga

SEQ ID NO: 8737 - RNA, 20 nt, Homo sapiens
  source 1..20: mol_type = genomic RNA
ggcacctttgtgagaaagaa

SEQ ID NO: 8738 - RNA, 20 nt, Homo sapiens
  source 1..20: mol_type = genomic RNA
gcacctttgtgagaaagaaa

SEQ ID NO: 8739 - RNA, 20 nt, Homo sapiens
  source 1..20: mol_type = genomic RNA
cacctttgtgagaaagaaaa

SEQ ID NO: 8740 - RNA, 20 nt, Homo sapiens
  source 1..20: mol_type = genomic RNA
acctttgtgagaaagaaaaa

SEQ ID NO: 8741 - RNA, 20 nt, Homo sapiens
  source 1..20: mol_type = genomic RNA
cctttgtgagaaagaaaaaa

SEQ ID NO: 8742 - RNA, 20 nt, Homo sapiens
  source 1..20: mol_type = genomic RNA
ctttgtgagaaagaaaaaat

SEQ ID NO: 8743 - RNA, 20 nt, Homo sapiens
  source 1..20: mol_type = genomic RNA
tttgtgagaaagaaaaaata

SEQ ID NO: 8744 - RNA, 20 nt, Homo sapiens
  source 1..20: mol_type = genomic RNA
ttgtgagaaagaaaaaatag

SEQ ID NO: 8745 - RNA, 20 nt, Homo sapiens
  source 1..20: mol_type = genomic RNA
tgtgagaaagaaaaaataga

SEQ ID NO: 8746 - RNA, 20 nt, Homo sapiens
  source 1..20: mol_type = genomic RNA
gtgagaaagaaaaaatagat

SEQ ID NO: 8747 - RNA, 20 nt, Homo sapiens
  source 1..20: mol_type = genomic RNA
tgagaaagaaaaaatagatg

SEQ ID NO: 8748 - RNA, 20 nt, Homo sapiens
  source 1..20: mol_type = genomic RNA
gagaaagaaaaaatagatgc

SEQ ID NO: 8749 - RNA, 20 nt, Homo sapiens
  source 1..20: mol_type = genomic RNA
agaaagaaaaaatagatgcc

SEQ ID NO: 8750 - RNA, 20 nt, Homo sapiens
  source 1..20: mol_type = genomic RNA
gaaagaaaaaatagatgcct

SEQ ID NO: 8751 - RNA, 20 nt, Homo sapiens
  source 1..20: mol_type = genomic RNA
aaagaaaaaatagatgcctc

SEQ ID NO: 8752 - RNA, 20 nt, Homo sapiens
  source 1..20: mol_type = genomic RNA
aagaaaaaatagatgcctct

SEQ ID NO: 8753 - RNA, 20 nt, Homo sapiens
  source 1..20: mol_type = genomic RNA
agaaaaaatagatgcctctt

SEQ ID NO: 8754 - RNA, 20 nt, Homo sapiens
  source 1..20: mol_type = genomic RNA
gaaaaaatagatgcctcttc

SEQ ID NO: 8755 - RNA, 20 nt, Homo sapiens
  source 1..20: mol_type = genomic RNA
aaaaaatagatgcctcttct

SEQ ID NO: 8756 - RNA, 20 nt, Homo sapiens
  source 1..20: mol_type = genomic RNA
aaaaatagatgcctcttctt

SEQ ID NO: 8757 - RNA, 20 nt, Homo sapiens
  source 1..20: mol_type = genomic RNA
aaaatagatgcctcttcttc

SEQ ID NO: 8758 - RNA, 20 nt, Homo sapiens
  source 1..20: mol_type = genomic RNA
aaatagatgcctcttcttca

SEQ ID NO: 8759 - RNA, 20 nt, Homo sapiens
  source 1..20: mol_type = genomic RNA
aatagatgcctcttcttcaa

SEQ ID NO: 8760 - RNA, 20 nt, Homo sapiens
  source 1..20: mol_type = genomic RNA
atagatgcctcttcttcaag

SEQ ID NO: 8761 - RNA, 20 nt, Homo sapiens
  source 1..20: mol_type = genomic RNA
tagatgcctcttcttcaaga

SEQ ID NO: 8762 - RNA, 20 nt, Homo sapiens
  source 1..20: mol_type = genomic RNA
agatgcctcttcttcaagat

SEQ ID NO: 8763 - RNA, 20 nt, Homo sapiens
  source 1..20: mol_type = genomic RNA
gatgcctcttcttcaagatg

SEQ ID NO: 8764 - RNA, 20 nt, Homo sapiens
  source 1..20: mol_type = genomic RNA
atgcctcttcttcaagatgc

SEQ ID NO: 8765 - RNA, 20 nt, Homo sapiens
  source 1..20: mol_type = genomic RNA
tgcctcttcttcaagatgca

SEQ ID NO: 8766 - RNA, 20 nt, Homo sapiens
  source 1..20: mol_type = genomic RNA
gcctcttcttcaagatgcat

SEQ ID NO: 8767 - RNA, 20 nt, Homo sapiens
  source 1..20: mol_type = genomic RNA
cctcttcttcaagatgcatt

SEQ ID NO: 8768 - RNA, 20 nt, Homo sapiens
  source 1..20: mol_type = genomic RNA
ctcttcttcaagatgcattg

SEQ ID NO: 8769 - RNA, 20 nt, Homo sapiens
  source 1..20: mol_type = genomic RNA
tcttcttcaagatgcattgt

SEQ ID NO: 8770 - RNA, 20 nt, Homo sapiens
  source 1..20: mol_type = genomic RNA
cttcttcaagatgcattgtt

SEQ ID NO: 8771 - RNA, 20 nt, Homo sapiens
  source 1..20: mol_type = genomic RNA
ttcttcaagatgcattgttt

SEQ ID NO: 8772 - RNA, 20 nt, Homo sapiens
  source 1..20: mol_type = genomic RNA
tcttcaagatgcattgtttc

SEQ ID NO: 8773 - RNA, 20 nt, Homo sapiens
  source 1..20: mol_type = genomic RNA
cttcaagatgcattgtttct

SEQ ID NO: 8774 - RNA, 20 nt, Homo sapiens
  source 1..20: mol_type = genomic RNA
ttcaagatgcattgtttcta

SEQ ID NO: 8775 - RNA, 20 nt, Homo sapiens
  source 1..20: mol_type = genomic RNA
tcaagatgcattgtttctat

SEQ ID NO: 8776 - RNA, 20 nt, Homo sapiens
  source 1..20: mol_type = genomic RNA
caagatgcattgtttctatt

SEQ ID NO: 8777 - RNA, 20 nt, Homo sapiens
  source 1..20: mol_type = genomic RNA
aagatgcattgtttctattg

SEQ ID NO: 8778 - RNA, 20 nt, Homo sapiens
  source 1..20: mol_type = genomic RNA
agatgcattgtttctattgg

SEQ ID NO: 8779 - RNA, 20 nt, Homo sapiens
  source 1..20: mol_type = genomic RNA
gatgcattgtttctattggt

SEQ ID NO: 8780 - RNA, 20 nt, Homo sapiens
  source 1..20: mol_type = genomic RNA
atgcattgtttctattggtc

SEQ ID NO: 8781 - RNA, 20 nt, Homo sapiens
  source 1..20: mol_type = genomic RNA
tgcattgtttctattggtca

SEQ ID NO: 8782 - RNA, 20 nt, Homo sapiens
  source 1..20: mol_type = genomic RNA
gcattgtttctattggtcag

SEQ ID NO: 8783 - RNA, 20 nt, Homo sapiens
  source 1..20: mol_type = genomic RNA
cattgtttctattggtcagg

SEQ ID NO: 8784 - RNA, 20 nt, Homo sapiens
  source 1..20: mol_type = genomic RNA
attgtttctattggtcaggc

SEQ ID NO: 8785 - RNA, 20 nt, Homo sapiens
  source 1..20: mol_type = genomic RNA
ttgtttctattggtcaggca

SEQ ID NO: 8786 - RNA, 20 nt, Homo sapiens
  source 1..20: mol_type = genomic RNA
tgtttctattggtcaggcaa

SEQ ID NO: 8787 - RNA, 20 nt, Homo sapiens
  source 1..20: mol_type = genomic RNA
gtttctattggtcaggcaat

SEQ ID NO: 8788 - RNA, 20 nt, Homo sapiens
  source 1..20: mol_type = genomic RNA
tttctattggtcaggcaatt

SEQ ID NO: 8789 - RNA, 20 nt, Homo sapiens
  source 1..20: mol_type = genomic RNA
ttctattggtcaggcaattg

SEQ ID NO: 8790 - RNA, 20 nt, Homo sapiens
  source 1..20: mol_type = genomic RNA
tctattggtcaggcaattgt

SEQ ID NO: 8791 - RNA, 20 nt, Homo sapiens
  source 1..20: mol_type = genomic RNA
ctattggtcaggcaattgtc

SEQ ID NO: 8792 - RNA, 20 nt, Homo sapiens
  source 1..20: mol_type = genomic RNA
tattggtcaggcaattgtca

SEQ ID NO: 8793 - RNA, 20 nt, Homo sapiens
  source 1..20: mol_type = genomic RNA
attggtcaggcaattgtcat

SEQ ID NO: 8794 - RNA, 20 nt, Homo sapiens
  source 1..20: mol_type = genomic RNA
ttggtcaggcaattgtcata

SEQ ID NO: 8795 - RNA, 20 nt, Homo sapiens
  source 1..20: mol_type = genomic RNA
tggtcaggcaattgtcataa

SEQ ID NO: 8796 - RNA, 20 nt, Homo sapiens
  source 1..20: mol_type = genomic RNA
ggtcaggcaattgtcataat

SEQ ID NO: 8797 - RNA, 20 nt, Homo sapiens
  source 1..20: mol_type = genomic RNA
gtcaggcaattgtcataata

SEQ ID NO: 8798 - RNA, 20 nt, Homo sapiens
  source 1..20: mol_type = genomic RNA
tcaggcaattgtcataataa

SEQ ID NO: 8799 - RNA, 20 nt, Homo sapiens
  source 1..20: mol_type = genomic RNA
caggcaattgtcataataaa

SEQ ID NO: 8800 - RNA, 20 nt, Homo sapiens
  source 1..20: mol_type = genomic RNA
aggcaattgtcataataaac

SEQ ID NO: 8801 - RNA, 20 nt, Homo sapiens
  source 1..20: mol_type = genomic RNA
ggcaattgtcataataaact

SEQ ID NO: 8802 - RNA, 20 nt, Homo sapiens
  source 1..20: mol_type = genomic RNA
gcaattgtcataataaactt

SEQ ID NO: 8803 - RNA, 20 nt, Homo sapiens
  source 1..20: mol_type = genomic RNA
caattgtcataataaactta

SEQ ID NO: 8804 - RNA, 20 nt, Homo sapiens
  source 1..20: mol_type = genomic RNA
aattgtcataataaacttat

SEQ ID NO: 8805 - RNA, 20 nt, Homo sapiens
  source 1..20: mol_type = genomic RNA
attgtcataataaacttatg

SEQ ID NO: 8806 - RNA, 20 nt, Homo sapiens
  source 1..20: mol_type = genomic RNA
ttgtcataataaacttatgt

SEQ ID NO: 8807 - RNA, 20 nt, Homo sapiens
  source 1..20: mol_type = genomic RNA
tgtcataataaacttatgtc

SEQ ID NO: 8808 - RNA, 20 nt, Homo sapiens
  source 1..20: mol_type = genomic RNA
gtcataataaacttatgtca

SEQ ID NO: 8809 - RNA, 20 nt, Homo sapiens
  source 1..20: mol_type = genomic RNA
tcataataaacttatgtcat

SEQ ID NO: 8810 - RNA, 20 nt, Homo sapiens
  source 1..20: mol_type = genomic RNA
cataataaacttatgtcatt

SEQ ID NO: 8811 - RNA, 20 nt, Homo sapiens
  source 1..20: mol_type = genomic RNA
ataataaacttatgtcattg

SEQ ID NO: 8812 - RNA, 20 nt, Homo sapiens
  source 1..20: mol_type = genomic RNA
taataaacttatgtcattga

SEQ ID NO: 8813 - RNA, 20 nt, Homo sapiens
  source 1..20: mol_type = genomic RNA
aataaacttatgtcattgaa

SEQ ID NO: 8814 - RNA, 20 nt, Homo sapiens
  source 1..20: mol_type = genomic RNA
ataaacttatgtcattgaaa

SEQ ID NO: 8815 - RNA, 20 nt, Homo sapiens
  source 1..20: mol_type = genomic RNA
taaacttatgtcattgaaaa

SEQ ID NO: 8816 - RNA, 20 nt, Homo sapiens
  source 1..20: mol_type = genomic RNA
aaacttatgtcattgaaaac

SEQ ID NO: 8817 - RNA, 20 nt, Homo sapiens
  source 1..20: mol_type = genomic RNA
aacttatgtcattgaaaacg

SEQ ID NO: 8818 - RNA, 20 nt, Homo sapiens
  source 1..20: mol_type = genomic RNA
acttatgtcattgaaaacgg

SEQ ID NO: 8819 - RNA, 20 nt, Homo sapiens
  source 1..20: mol_type = genomic RNA
cttatgtcattgaaaacggt

SEQ ID NO: 8820 - RNA, 20 nt, Homo sapiens
  source 1..20: mol_type = genomic RNA
ttatgtcattgaaaacggta

SEQ ID NO: 8821 - RNA, 20 nt, Homo sapiens
  source 1..20: mol_type = genomic RNA
tatgtcattgaaaacggtac

SEQ ID NO: 8822 - RNA, 20 nt, Homo sapiens
  source 1..20: mol_type = genomic RNA
atgtcattgaaaacggtacc

SEQ ID NO: 8823 - RNA, 20 nt, Homo sapiens
  source 1..20: mol_type = genomic RNA
tgtcattgaaaacggtacct

SEQ ID NO: 8824 - RNA, 20 nt, Homo sapiens
  source 1..20: mol_type = genomic RNA
gtcattgaaaacggtacctg

SEQ ID NO: 8825 - RNA, 20 nt, Homo sapiens
  source 1..20: mol_type = genomic RNA
tcattgaaaacggtacctga

SEQ ID NO: 8826 - RNA, 20 nt, Homo sapiens
  source 1..20: mol_type = genomic RNA
cattgaaaacggtacctgac

SEQ ID NO: 8827 - RNA, 20 nt, Homo sapiens
  source 1..20: mol_type = genomic RNA
attgaaaacggtacctgact

SEQ ID NO: 8828 - RNA, 20 nt, Homo sapiens
  source 1..20: mol_type = genomic RNA
ttgaaaacggtacctgacta

SEQ ID NO: 8829 - RNA, 20 nt, Homo sapiens
  source 1..20: mol_type = genomic RNA
tgaaaacggtacctgactac

SEQ ID NO: 8830 - RNA, 20 nt, Homo sapiens
  source 1..20: mol_type = genomic RNA
gaaaacggtacctgactacc

SEQ ID NO: 8831 - RNA, 20 nt, Homo sapiens
  source 1..20: mol_type = genomic RNA
aaaacggtacctgactacca

SEQ ID NO: 8832 - RNA, 20 nt, Homo sapiens
  source 1..20: mol_type = genomic RNA
aaacggtacctgactaccat

SEQ ID NO: 8833 - RNA, 20 nt, Homo sapiens
  source 1..20: mol_type = genomic RNA
aacggtacctgactaccatt

SEQ ID NO: 8834 - RNA, 20 nt, Homo sapiens
  source 1..20: mol_type = genomic RNA
acggtacctgactaccattt

SEQ ID NO: 8835 - RNA, 20 nt, Homo sapiens
  source 1..20: mol_type = genomic RNA
cggtacctgactaccatttg

SEQ ID NO: 8836 - RNA, 20 nt, Homo sapiens
  source 1..20: mol_type = genomic RNA
ggtacctgactaccatttgc

SEQ ID NO: 8837 - RNA, 20 nt, Homo sapiens
  source 1..20: mol_type = genomic RNA
gtacctgactaccatttgct

SEQ ID NO: 8838 - RNA, 20 nt, Homo sapiens
  source 1..20: mol_type = genomic RNA
tacctgactaccatttgctg

SEQ ID NO: 8839 - RNA, 20 nt, Homo sapiens
  source 1..20: mol_type = genomic RNA
acctgactaccatttgctgg

SEQ ID NO: 8840 - RNA, 20 nt, Homo sapiens
  source 1..20: mol_type = genomic RNA
cctgactaccatttgctgga

SEQ ID NO: 8841 - RNA, 20 nt, Homo sapiens
  source 1..20: mol_type = genomic RNA
ctgactaccatttgctggaa

SEQ ID NO: 8842 - RNA, 20 nt, Homo sapiens
  source 1..20: mol_type = genomic RNA
tgactaccatttgctggaaa

SEQ ID NO: 8843 - RNA, 20 nt, Homo sapiens
  source 1..20: mol_type = genomic RNA
gactaccatttgctggaaat

SEQ ID NO: 8844 - RNA, 20 nt, Homo sapiens
  source 1..20: mol_type = genomic RNA
actaccatttgctggaaatt

SEQ ID NO: 8845 - RNA, 20 nt, Homo sapiens
  source 1..20: mol_type = genomic RNA
ctaccatttgctggaaattt

SEQ ID NO: 8846 - RNA, 20 nt, Homo sapiens
  source 1..20: mol_type = genomic RNA
taccatttgctggaaatttg

SEQ ID NO: 8847 - RNA, 20 nt, Homo sapiens
  source 1..20: mol_type = genomic RNA
accatttgctggaaatttga

SEQ ID NO: 8848 - RNA, 20 nt, Homo sapiens
  source 1..20: mol_type = genomic RNA
ccatttgctggaaatttgac

SEQ ID NO: 8849 - RNA, 20 nt, Homo sapiens
  source 1..20: mol_type = genomic RNA
catttgctggaaatttgaca

SEQ ID NO: 8850 - RNA, 20 nt, Homo sapiens
  source 1..20: mol_type = genomic RNA
atttgctggaaatttgacat

SEQ ID NO: 8851 - RNA, 20 nt, Homo sapiens
  source 1..20: mol_type = genomic RNA
tttgctggaaatttgacatg

SEQ ID NO: 8852 - RNA, 20 nt, Homo sapiens
  source 1..20: mol_type = genomic RNA
ttgctggaaatttgacatgt

SEQ ID NO: 8853 - RNA, 20 nt, Homo sapiens
  source 1..20: mol_type = genomic RNA
tgctggaaatttgacatgtg

SEQ ID NO: 8854 - RNA, 20 nt, Homo sapiens
  source 1..20: mol_type = genomic RNA
gctggaaatttgacatgtgt

SEQ ID NO: 8855 - RNA, 20 nt, Homo sapiens
  source 1..20: mol_type = genomic RNA
ctggaaatttgacatgtgtg

SEQ ID NO: 8856 - RNA, 20 nt, Homo sapiens
  source 1..20: mol_type = genomic RNA
tggaaatttgacatgtgtgt

SEQ ID NO: 8857 - RNA, 20 nt, Homo sapiens
  source 1..20: mol_type = genomic RNA
ggaaatttgacatgtgtgtg

SEQ ID NO: 8858 - RNA, 20 nt, Homo sapiens
  source 1..20: mol_type = genomic RNA
gaaatttgacatgtgtgtgg

SEQ ID NO: 8859 - RNA, 20 nt, Homo sapiens
  source 1..20: mol_type = genomic RNA
aaatttgacatgtgtgtggc

SEQ ID NO: 8860 - RNA, 20 nt, Homo sapiens
  source 1..20: mol_type = genomic RNA
aatttgacatgtgtgtggca

SEQ ID NO: 8861 - RNA, 20 nt, Homo sapiens
  source 1..20: mol_type = genomic RNA
atttgacatgtgtgtggcat

SEQ ID NO: 8862 - RNA, 20 nt, Homo sapiens
  source 1..20: mol_type = genomic RNA
tttgacatgtgtgtggcatt

SEQ ID NO: 8863 - RNA, 20 nt, Homo sapiens
  source 1..20: mol_type = genomic RNA
ttgacatgtgtgtggcatta

SEQ ID NO: 8864 - RNA, 20 nt, Homo sapiens
  source 1..20: mol_type = genomic RNA
tgacatgtgtgtggcattat

SEQ ID NO: 8865 - RNA, 20 nt, Homo sapiens
  source 1..20: mol_type = genomic RNA
gacatgtgtgtggcattatc

SEQ ID NO: 8866 - RNA, 20 nt, Homo sapiens
  source 1..20: mol_type = genomic RNA
acatgtgtgtggcattatca

SEQ ID NO: 8867 - RNA, 20 nt, Homo sapiens
  source 1..20: mol_type = genomic RNA
catgtgtgtggcattatcaa

SEQ ID NO: 8868 - RNA, 20 nt, Homo sapiens
  source 1..20: mol_type = genomic RNA
atgtgtgtggcattatcaaa

SEQ ID NO: 8869 - RNA, 20 nt, Homo sapiens
  source 1..20: mol_type = genomic RNA
tgtgtgtggcattatcaaaa

SEQ ID NO: 8870 - RNA, 20 nt, Homo sapiens
  source 1..20: mol_type = genomic RNA
gtgtgtggcattatcaaaat

SEQ ID NO: 8871 - RNA, 20 nt, Homo sapiens
  source 1..20: mol_type = genomic RNA
tgtgtggcattatcaaaatg

SEQ ID NO: 8872 - RNA, 20 nt, Homo sapiens
  source 1..20: mol_type = genomic RNA
gtgtggcattatcaaaatga

SEQ ID NO: 8873 - RNA, 20 nt, Homo sapiens
  source 1..20: mol_type = genomic RNA
tgtggcattatcaaaatgaa

SEQ ID NO: 8874 - RNA, 20 nt, Homo sapiens
  source 1..20: mol_type = genomic RNA
gtggcattatcaaaatgaag

SEQ ID NO: 8875 - RNA, 20 nt, Homo sapiens
  source 1..20: mol_type = genomic RNA
tggcattatcaaaatgaaga

SEQ ID NO: 8876 - RNA, 20 nt, Homo sapiens
  source 1..20: mol_type = genomic RNA
ggcattatcaaaatgaagag

SEQ ID NO: 8877 - RNA, 20 nt, Homo sapiens
  source 1..20: mol_type = genomic RNA
gcattatcaaaatgaagagg

SEQ ID NO: 8878 - RNA, 20 nt, Homo sapiens
  source 1..20: mol_type = genomic RNA
cattatcaaaatgaagagga

SEQ ID NO: 8879 - RNA, 20 nt, Homo sapiens
  source 1..20: mol_type = genomic RNA
attatcaaaatgaagaggag

SEQ ID NO: 8880 - RNA, 20 nt, Homo sapiens
  source 1..20: mol_type = genomic RNA
ttatcaaaatgaagaggagc

SEQ ID NO: 8881 - RNA, 20 nt, Homo sapiens
  source 1..20: mol_type = genomic RNA
tatcaaaatgaagaggagca

SEQ ID NO: 8882 - RNA, 20 nt, Homo sapiens
  source 1..20: mol_type = genomic RNA
atcaaaatgaagaggagcaa

SEQ ID NO: 8883 - RNA, 20 nt, Homo sapiens
  source 1..20: mol_type = genomic RNA
tcaaaatgaagaggagcaag

SEQ ID NO: 8884 - RNA, 20 nt, Homo sapiens
  source 1..20: mol_type = genomic RNA
caaaatgaagaggagcaagg

SEQ ID NO: 8885 - RNA, 20 nt, Homo sapiens
  source 1..20: mol_type = genomic RNA
aaaatgaagaggagcaagga

SEQ ID NO: 8886 - RNA, 20 nt, Homo sapiens
  source 1..20: mol_type = genomic RNA
aaatgaagaggagcaaggag

SEQ ID NO: 8887 - RNA, 20 nt, Homo sapiens
  source 1..20: mol_type = genomic RNA
aatgaagaggagcaaggagt

SEQ ID NO: 8888 - RNA, 20 nt, Homo sapiens
  source 1..20: mol_type = genomic RNA
atgaagaggagcaaggagtg

SEQ ID NO: 8889 - RNA, 20 nt, Homo sapiens
  source 1..20: mol_type = genomic RNA
tgaagaggagcaaggagtga

SEQ ID NO: 8890 - RNA, 20 nt, Homo sapiens
  source 1..20: mol_type = genomic RNA
gaagaggagcaaggagtgaa

SEQ ID NO: 8891 - RNA, 20 nt, Homo sapiens
  source 1..20: mol_type = genomic RNA
aagaggagcaaggagtgaag

SEQ ID NO: 8892 - RNA, 20 nt, Homo sapiens
  source 1..20: mol_type = genomic RNA
agaggagcaaggagtgaagg

SEQ ID NO: 8893 - RNA, 20 nt, Homo sapiens
  source 1..20: mol_type = genomic RNA
gaggagcaaggagtgaagga

SEQ ID NO: 8894 - RNA, 20 nt, Homo sapiens
  source 1..20: mol_type = genomic RNA
aggagcaaggagtgaaggag

SEQ ID NO: 8895 - RNA, 20 nt, Homo sapiens
  source 1..20: mol_type = genomic RNA
ggagcaaggagtgaaggagt

SEQ ID NO: 8896 - RNA, 20 nt, Homo sapiens
  source 1..20: mol_type = genomic RNA
gagcaaggagtgaaggagtg

SEQ ID NO: 8897 - RNA, 20 nt, Homo sapiens
  source 1..20: mol_type = genomic RNA
agcaaggagtgaaggagtgg

SEQ ID NO: 8898 - RNA, 20 nt, Homo sapiens
  source 1..20: mol_type = genomic RNA
gcaaggagtgaaggagtggg

SEQ ID NO: 8899 - RNA, 20 nt, Homo sapiens
  source 1..20: mol_type = genomic RNA
caaggagtgaaggagtgggg

SEQ ID NO: 8900 - RNA, 20 nt, Homo sapiens
  source 1..20: mol_type = genomic RNA
aaggagtgaaggagtggggt

SEQ ID NO: 8901 - RNA, 20 nt, Homo sapiens
  source 1..20: mol_type = genomic RNA
aggagtgaaggagtggggtt

SEQ ID NO: 8902 - RNA, 20 nt, Homo sapiens
  source 1..20: mol_type = genomic RNA
ggagtgaaggagtggggtta

SEQ ID NO: 8903 - RNA, 20 nt, Homo sapiens
  source 1..20: mol_type = genomic RNA
gagtgaaggagtggggttat

SEQ ID NO: 8904 - RNA, 20 nt, Homo sapiens
  source 1..20: mol_type = genomic RNA
agtgaaggagtggggttatg

SEQ ID NO: 8905 - RNA, 20 nt, Homo sapiens
  source 1..20: mol_type = genomic RNA
gtgaaggagtggggttatga

SEQ ID NO: 8906 - RNA, 20 nt, Homo sapiens
  source 1..20: mol_type = genomic RNA
tgaaggagtggggttatgaa

SEQ ID NO: 8907 - RNA, 20 nt, Homo sapiens
  source 1..20: mol_type = genomic RNA
gaaggagtggggttatgaat

SEQ ID NO: 8908 - RNA, 20 nt, Homo sapiens
  source 1..20: mol_type = genomic RNA
aaggagtggggttatgaatc

SEQ ID NO: 8909 - RNA, 20 nt, Homo sapiens
  source 1..20: mol_type = genomic RNA
aggagtggggttatgaatct

SEQ ID NO: 8910 - RNA, 20 nt, Homo sapiens
  source 1..20: mol_type = genomic RNA
ggagtggggttatgaatctg

SEQ ID NO: 8911 - RNA, 20 nt, Homo sapiens
  source 1..20: mol_type = genomic RNA
gagtggggttatgaatctgc

SEQ ID NO: 8912 - RNA, 20 nt, Homo sapiens
  source 1..20: mol_type = genomic RNA
agtggggttatgaatctgcc

SEQ ID NO: 8913 - RNA, 20 nt, Homo sapiens
  source 1..20: mol_type = genomic RNA
gtggggttatgaatctgcca

SEQ ID NO: 8914 - RNA, 20 nt, Homo sapiens
  source 1..20: mol_type = genomic RNA
tggggttatgaatctgccaa

SEQ ID NO: 8915 - RNA, 20 nt, Homo sapiens
  source 1..20: mol_type = genomic RNA
ggggttatgaatctgccaaa

SEQ ID NO: 8916 - RNA, 20 nt, Homo sapiens
  source 1..20: mol_type = genomic RNA
gggttatgaatctgccaaag

SEQ ID NO: 8917 - RNA, 20 nt, Homo sapiens
  source 1..20: mol_type = genomic RNA
ggttatgaatctgccaaagg

SEQ ID NO: 8918 - RNA, 20 nt, Homo sapiens
  source 1..20: mol_type = genomic RNA
gttatgaatctgccaaaggt

SEQ ID NO: 8919 - RNA, 20 nt, Homo sapiens
  source 1..20: mol_type = genomic RNA
ttatgaatctgccaaaggtg

SEQ ID NO: 8920 - RNA, 20 nt, Homo sapiens
  source 1..20: mol_type = genomic RNA
tatgaatctgccaaaggtgg

SEQ ID NO: 8921 - RNA, 20 nt, Homo sapiens
  source 1..20: mol_type = genomic RNA
atgaatctgccaaaggtggt

SEQ ID NO: 8922 - RNA, 20 nt, Homo sapiens
  source 1..20: mol_type = genomic RNA
tgaatctgccaaaggtggta

SEQ ID NO: 8923 - RNA, 20 nt, Homo sapiens
  source 1..20: mol_type = genomic RNA
gaatctgccaaaggtggtat

SEQ ID NO: 8924 - RNA, 20 nt, Homo sapiens
  source 1..20: mol_type = genomic RNA
aatctgccaaaggtggtatg

SEQ ID NO: 8925 - RNA, 20 nt, Homo sapiens
  source 1..20: mol_type = genomic RNA
atctgccaaaggtggtatga

SEQ ID NO: 8926 - RNA, 20 nt, Homo sapiens
  source 1..20: mol_type = genomic RNA
tctgccaaaggtggtatgaa

SEQ ID NO: 8927 - RNA, 20 nt, Homo sapiens
  source 1..20: mol_type = genomic RNA
ctgccaaaggtggtatgaac

SEQ ID NO: 8928 - RNA, 20 nt, Homo sapiens
  source 1..20: mol_type = genomic RNA
tgccaaaggtggtatgaacc

SEQ ID NO: 8929 - RNA, 20 nt, Homo sapiens
  source 1..20: mol_type = genomic RNA
gccaaaggtggtatgaacca

SEQ ID NO: 8930 - RNA, 20 nt, Homo sapiens
  source 1..20: mol_type = genomic RNA
ccaaaggtggtatgaaccaa

SEQ ID NO: 8931 - RNA, 20 nt, Homo sapiens
  source 1..20: mol_type = genomic RNA
caaaggtggtatgaaccaac

SEQ ID NO: 8932 - RNA, 20 nt, Homo sapiens
  source 1..20: mol_type = genomic RNA
aaaggtggtatgaaccaacc

SEQ ID NO: 8933 - RNA, 20 nt, Homo sapiens
  source 1..20: mol_type = genomic RNA
aaggtggtatgaaccaaccc

SEQ ID NO: 8934 - RNA, 20 nt, Homo sapiens
  source 1..20: mol_type = genomic RNA
aggtggtatgaaccaacccc

SEQ ID NO: 8935 - RNA, 20 nt, Homo sapiens
  source 1..20: mol_type = genomic RNA
ggtggtatgaaccaacccct

SEQ ID NO: 8936 - RNA, 20 nt, Homo sapiens
  source 1..20: mol_type = genomic RNA
gtggtatgaaccaacccctg

SEQ ID NO: 8937 - RNA, 20 nt, Homo sapiens
  source 1..20: mol_type = genomic RNA
tggtatgaaccaacccctgg

SEQ ID NO: 8938 - RNA, 20 nt, Homo sapiens
  source 1..20: mol_type = genomic RNA
ggtatgaaccaacccctgga

SEQ ID NO: 8939 - RNA, 20 nt, Homo sapiens
  source 1..20: mol_type = genomic RNA
gtatgaaccaacccctggaa

SEQ ID NO: 8940 - RNA, 20 nt, Homo sapiens
  source 1..20: mol_type = genomic RNA
tatgaaccaacccctggaag

SEQ ID NO: 8941 - RNA, 20 nt, Homo sapiens
  source 1..20: mol_type = genomic RNA
atgaaccaacccctggaagc

SEQ ID NO: 8942 - RNA, 20 nt, Homo sapiens
  source 1..20: mol_type = genomic RNA
tgaaccaacccctggaagcc

SEQ ID NO: 8943 - RNA, 20 nt, Homo sapiens
  source 1..20: mol_type = genomic RNA
gaaccaacccctggaagcca

SEQ ID NO: 8944 - RNA, 20 nt, Homo sapiens
  source 1..20: mol_type = genomic RNA
aaccaacccctggaagccaa

SEQ ID NO: 8945 - RNA, 20 nt, Homo sapiens
  source 1..20: mol_type = genomic RNA
accaacccctggaagccaaa

SEQ ID NO: 8946 - RNA, 20 nt, Homo sapiens
  source 1..20: mol_type = genomic RNA
ccaacccctggaagccaaag

SEQ ID NO: 8947 - RNA, 20 nt, Homo sapiens
  source 1..20: mol_type = genomic RNA
caacccctggaagccaaagc

SEQ ID NO: 8948 - RNA, 20 nt, Homo sapiens
  source 1..20: mol_type = genomic RNA
aacccctggaagccaaagcg

SEQ ID NO: 8949 - RNA, 20 nt, Homo sapiens
  source 1..20: mol_type = genomic RNA
acccctggaagccaaagcgg

SEQ ID NO: 8950 - RNA, 20 nt, Homo sapiens
  source 1..20: mol_type = genomic RNA
cccctggaagccaaagcggc

SEQ ID NO: 8951 - RNA, 20 nt, Homo sapiens
  source 1..20: mol_type = genomic RNA
ccctggaagccaaagcggcc

SEQ ID NO: 8952 - RNA, 20 nt, Homo sapiens
  source 1..20: mol_type = genomic RNA
cctggaagccaaagcggcct

SEQ ID NO: 8953 - RNA, 20 nt, Homo sapiens
  source 1..20: mol_type = genomic RNA
ctggaagccaaagcggcctc

SEQ ID NO: 8954 - RNA, 20 nt, Homo sapiens
  source 1..20: mol_type = genomic RNA
tggaagccaaagcggcctct

SEQ ID NO: 8955 - RNA, 20 nt, Homo sapiens
  source 1..20: mol_type = genomic RNA
ggaagccaaagcggcctctc

SEQ ID NO: 8956 - RNA, 20 nt, Homo sapiens
  source 1..20: mol_type = genomic RNA
gaagccaaagcggcctctcc

SEQ ID NO: 8957 - RNA, 20 nt, Homo sapiens
  source 1..20: mol_type = genomic RNA
aagccaaagcggcctctcca

SEQ ID NO: 8958 - RNA, 20 nt, Homo sapiens
  source 1..20: mol_type = genomic RNA
agccaaagcggcctctccaa

SEQ ID NO: 8959 - RNA, 20 nt, Homo sapiens
  source 1..20: mol_type = genomic RNA
gccaaagcggcctctccaag

SEQ ID NO: 8960 - RNA, 20 nt, Homo sapiens
  source 1..20: mol_type = genomic RNA
ccaaagcggcctctccaagg

SEQ ID NO: 8961 - RNA, 20 nt, Homo sapiens
  source 1..20: mol_type = genomic RNA
caaagcggcctctccaaggt

SEQ ID NO: 8962 - RNA, 20 nt, Homo sapiens
  source 1..20: mol_type = genomic RNA
aaagcggcctctccaaggtt

SEQ ID NO: 8963 - RNA, 20 nt, Homo sapiens
  source 1..20: mol_type = genomic RNA
aagcggcctctccaaggtta

SEQ ID NO: 8964 - RNA, 20 nt, Homo sapiens
  source 1..20: mol_type = genomic RNA
agcggcctctccaaggttaa

SEQ ID NO: 8965 - RNA, 20 nt, Homo sapiens
  source 1..20: mol_type = genomic RNA
gcggcctctccaaggttaaa

SEQ ID NO: 8966 - RNA, 20 nt, Homo sapiens
  source 1..20: mol_type = genomic RNA
cggcctctccaaggttaaat

SEQ ID NO: 8967 - RNA, 20 nt, Homo sapiens
  source 1..20: mol_type = genomic RNA
ggcctctccaaggttaaatt

SEQ ID NO: 8968 - RNA, 20 nt, Homo sapiens
  source 1..20: mol_type = genomic RNA
gcctctccaaggttaaattg

SEQ ID NO: 8969 - RNA, 20 nt, Homo sapiens
  source 1..20: mol_type = genomic RNA
cctctccaaggttaaattga

SEQ ID NO: 8970 - RNA, 20 nt, Homo sapiens
  source 1..20: mol_type = genomic RNA
ctctccaaggttaaattgat

SEQ ID NO: 8971 - RNA, 20 nt, Homo sapiens
  source 1..20: mol_type = genomic RNA
tctccaaggttaaattgatt

SEQ ID NO: 8972 - RNA, 20 nt, Homo sapiens
  source 1..20: mol_type = genomic RNA
ctccaaggttaaattgattg

SEQ ID NO: 8973 - RNA, 20 nt, Homo sapiens
  source 1..20: mol_type = genomic RNA
tccaaggttaaattgattgc

SEQ ID NO: 8974 - RNA, 20 nt, Homo sapiens
  source 1..20: mol_type = genomic RNA
ccaaggttaaattgattgca

SEQ ID NO: 8975 - RNA, 20 nt, Homo sapiens
  source 1..20: mol_type = genomic RNA
caaggttaaattgattgcag

SEQ ID NO: 8976 - RNA, 20 nt, Homo sapiens
  source 1..20: mol_type = genomic RNA
aaggttaaattgattgcagt

SEQ ID NO: 8977 - RNA, 20 nt, Homo sapiens
  source 1..20: mol_type = genomic RNA
aggttaaattgattgcagtt

SEQ ID NO: 8978 - RNA, 20 nt, Homo sapiens
  source 1..20: mol_type = genomic RNA
ggttaaattgattgcagttt

SEQ ID NO: 8979 - RNA, 20 nt, Homo sapiens
  source 1..20: mol_type = genomic RNA
gttaaattgattgcagtttg

SEQ ID NO: 8980 - RNA, 20 nt, Homo sapiens
  source 1..20: mol_type = genomic RNA
ttaaattgattgcagtttgc

SEQ ID NO: 8981 - RNA, 20 nt, Homo sapiens
  source 1..20: mol_type = genomic RNA
taaattgattgcagtttgca

SEQ ID NO: 8982 - RNA, 20 nt, Homo sapiens
  source 1..20: mol_type = genomic RNA
aaattgattgcagtttgcat

SEQ ID NO: 8983 - RNA, 20 nt, Homo sapiens
  source 1..20: mol_type = genomic RNA
aattgattgcagtttgcata

SEQ ID NO: 8984 - RNA, 20 nt, Homo sapiens
  source 1..20: mol_type = genomic RNA
attgattgcagtttgcatat

SEQ ID NO: 8985 - RNA, 20 nt, Homo sapiens
  source 1..20: mol_type = genomic RNA
ttgattgcagtttgcatatt

SEQ ID NO: 8986 - RNA, 20 nt, Homo sapiens
  source 1..20: mol_type = genomic RNA
tgattgcagtttgcatattg

SEQ ID NO: 8987 - RNA, 20 nt, Homo sapiens
  source 1..20: mol_type = genomic RNA
gattgcagtttgcatattgc

SEQ ID NO: 8988 - RNA, 20 nt, Homo sapiens
  source 1..20: mol_type = genomic RNA
attgcagtttgcatattgcc

SEQ ID NO: 8989 - RNA, 20 nt, Homo sapiens
  source 1..20: mol_type = genomic RNA
ttgcagtttgcatattgcct

SEQ ID NO: 8990 - RNA, 20 nt, Homo sapiens
  source 1..20: mol_type = genomic RNA
tgcagtttgcatattgccta

SEQ ID NO: 8991 - RNA, 20 nt, Homo sapiens
  source 1..20: mol_type = genomic RNA
gcagtttgcatattgcctaa

SEQ ID NO: 8992 - RNA, 20 nt, Homo sapiens
  source 1..20: mol_type = genomic RNA
cagtttgcatattgcctaaa

SEQ ID NO: 8993 - RNA, 20 nt, Homo sapiens
  source 1..20: mol_type = genomic RNA
agtttgcatattgcctaaat

SEQ ID NO: 8994 - RNA, 20 nt, Homo sapiens
  source 1..20: mol_type = genomic RNA
gtttgcatattgcctaaatt

SEQ ID NO: 8995 - RNA, 20 nt, Homo sapiens
  source 1..20: mol_type = genomic RNA
tttgcatattgcctaaattt

SEQ ID NO: 8996 - RNA, 20 nt, Homo sapiens
  source 1..20: mol_type = genomic RNA
ttgcatattgcctaaattta

SEQ ID NO: 8997 - RNA, 20 nt, Homo sapiens
  source 1..20: mol_type = genomic RNA
tgcatattgcctaaatttaa

SEQ ID NO: 8998 - RNA, 20 nt, Homo sapiens
  source 1..20: mol_type = genomic RNA
gcatattgcctaaatttaaa

SEQ ID NO: 8999 - RNA, 20 nt, Homo sapiens
  source 1..20: mol_type = genomic RNA
catattgcctaaatttaaac

SEQ ID NO: 9000 - RNA, 20 nt, Homo sapiens
  source 1..20: mol_type = genomic RNA
atattgcctaaatttaaact

SEQ ID NO: 9001 - RNA, 20 nt, Homo sapiens
  source 1..20: mol_type = genomic RNA
tattgcctaaatttaaactt

SEQ ID NO: 9002 - RNA, 20 nt, Homo sapiens
  source 1..20: mol_type = genomic RNA
attgcctaaatttaaacttt

SEQ ID NO: 9003 - RNA, 20 nt, Homo sapiens
  source 1..20: mol_type = genomic RNA
ttgcctaaatttaaactttc

SEQ ID NO: 9004 - RNA, 20 nt, Homo sapiens
  source 1..20: mol_type = genomic RNA
tgcctaaatttaaactttct

SEQ ID NO: 9005 - RNA, 20 nt, Homo sapiens
  source 1..20: mol_type = genomic RNA
gcctaaatttaaactttctc

SEQ ID NO: 9006 - RNA, 20 nt, Homo sapiens
  source 1..20: mol_type = genomic RNA
cctaaatttaaactttctca

SEQ ID NO: 9007 - RNA, 20 nt, Homo sapiens
  source 1..20: mol_type = genomic RNA
ctaaatttaaactttctcat

SEQ ID NO: 9008 - RNA, 20 nt, Homo sapiens
  source 1..20: mol_type = genomic RNA
taaatttaaactttctcatt

SEQ ID NO: 9009 - RNA, 20 nt, Homo sapiens
  source 1..20: mol_type = genomic RNA
aaatttaaactttctcattt

SEQ ID NO: 9010 - RNA, 20 nt, Homo sapiens
  source 1..20: mol_type = genomic RNA
aatttaaactttctcatttg

SEQ ID NO: 9011 - RNA, 20 nt, Homo sapiens
  source 1..20: mol_type = genomic RNA
atttaaactttctcatttgg

SEQ ID NO: 9012 - RNA, 20 nt, Homo sapiens
  source 1..20: mol_type = genomic RNA
tttaaactttctcatttggt

SEQ ID NO: 9013 - RNA, 20 nt, Homo sapiens
  source 1..20: mol_type = genomic RNA
ttaaactttctcatttggtg

SEQ ID NO: 9014 - RNA, 20 nt, Homo sapiens
  source 1..20: mol_type = genomic RNA
taaactttctcatttggtgg

SEQ ID NO: 9015 - RNA, 20 nt, Homo sapiens
  source 1..20: mol_type = genomic RNA
aaactttctcatttggtggg

SEQ ID NO: 9016 - RNA, 20 nt, Homo sapiens
  source 1..20: mol_type = genomic RNA
aactttctcatttggtgggg

SEQ ID NO: 9017 - RNA, 20 nt, Homo sapiens
  source 1..20: mol_type = genomic RNA
actttctcatttggtggggg

SEQ ID NO: 9018 - RNA, 20 nt, Homo sapiens
  source 1..20: mol_type = genomic RNA
ctttctcatttggtgggggt

SEQ ID NO: 9019 - RNA, 20 nt, Homo sapiens
  source 1..20: mol_type = genomic RNA
tttctcatttggtgggggtt

SEQ ID NO: 9020 - RNA, 20 nt, Homo sapiens
  source 1..20: mol_type = genomic RNA
ttctcatttggtgggggttc

SEQ ID NO: 9021 - RNA, 20 nt, Homo sapiens
  source 1..20: mol_type = genomic RNA
tctcatttggtgggggttca

SEQ ID NO: 9022 - RNA, 20 nt, Homo sapiens
  source 1..20: mol_type = genomic RNA
ctcatttggtgggggttcaa

SEQ ID NO: 9023 - RNA, 20 nt, Homo sapiens
  source 1..20: mol_type = genomic RNA
tcatttggtgggggttcaaa

SEQ ID NO: 9024 - RNA, 20 nt, Homo sapiens
  source 1..20: mol_type = genomic RNA
catttggtgggggttcaaaa

SEQ ID NO: 9025 - RNA, 20 nt, Homo sapiens
  source 1..20: mol_type = genomic RNA
atttggtgggggttcaaaag

SEQ ID NO: 9026 - RNA, 20 nt, Homo sapiens
  source 1..20: mol_type = genomic RNA
tttggtgggggttcaaaaga

SEQ ID NO: 9027 - RNA, 20 nt, Homo sapiens
  source 1..20: mol_type = genomic RNA
ttggtgggggttcaaaagaa

SEQ ID NO: 9028 - RNA, 20 nt, Homo sapiens
  source 1..20: mol_type = genomic RNA
tggtgggggttcaaaagaag

SEQ ID NO: 9029 - RNA, 20 nt, Homo sapiens
  source 1..20: mol_type = genomic RNA
ggtgggggttcaaaagaaga

SEQ ID NO: 9030 - RNA, 20 nt, Homo sapiens
  source 1..20: mol_type = genomic RNA
gtgggggttcaaaagaagaa

SEQ ID NO: 9031 - RNA, 20 nt, Homo sapiens
  source 1..20: mol_type = genomic RNA
tgggggttcaaaagaagaat

SEQ ID NO: 9032 - RNA, 20 nt, Homo sapiens
  source 1..20: mol_type = genomic RNA
gggggttcaaaagaagaatc

SEQ ID NO: 9033 - RNA, 20 nt, Homo sapiens
  source 1..20: mol_type = genomic RNA
ggggttcaaaagaagaatca

SEQ ID NO: 9034 - RNA, 20 nt, Homo sapiens
  source 1..20: mol_type = genomic RNA
gggttcaaaagaagaatcag

SEQ ID NO: 9035 - RNA, 20 nt, Homo sapiens
  source 1..20: mol_type = genomic RNA
ggttcaaaagaagaatcagc

SEQ ID NO: 9036 - RNA, 20 nt, Homo sapiens
  source 1..20: mol_type = genomic RNA
gttcaaaagaagaatcagct

SEQ ID NO: 9037 - RNA, 20 nt, Homo sapiens
  source 1..20: mol_type = genomic RNA
ttcaaaagaagaatcagctt

SEQ ID NO: 9038 - RNA, 20 nt, Homo sapiens
  source 1..20: mol_type = genomic RNA
tcaaaagaagaatcagcttg

SEQ ID NO: 9039 - RNA, 20 nt, Homo sapiens
  source 1..20: mol_type = genomic RNA
caaaagaagaatcagcttgt

SEQ ID NO: 9040 - RNA, 20 nt, Homo sapiens
  source 1..20: mol_type = genomic RNA
aaaagaagaatcagcttgtg

SEQ ID NO: 9041 - RNA, 20 nt, Homo sapiens
  source 1..20: mol_type = genomic RNA
aaagaagaatcagcttgtga

SEQ ID NO: 9042 - RNA, 20 nt, Homo sapiens
  source 1..20: mol_type = genomic RNA
aagaagaatcagcttgtgaa

SEQ ID NO: 9043 - RNA, 20 nt, Homo sapiens
  source 1..20: mol_type = genomic RNA
agaagaatcagcttgtgaaa

SEQ ID NO: 9044 - RNA, 20 nt, Homo sapiens
  source 1..20: mol_type = genomic RNA
gaagaatcagcttgtgaaaa

SEQ ID NO: 9045 - RNA, 20 nt, Homo sapiens
  source 1..20: mol_type = genomic RNA
aagaatcagcttgtgaaaaa

SEQ ID NO: 9046 - RNA, 20 nt, Homo sapiens
  source 1..20: mol_type = genomic RNA
agaatcagcttgtgaaaaat

SEQ ID NO: 9047 - RNA, 20 nt, Homo sapiens
  source 1..20: mol_type = genomic RNA
gaatcagcttgtgaaaaatc

SEQ ID NO: 9048 - RNA, 20 nt, Homo sapiens
  source 1..20: mol_type = genomic RNA
aatcagcttgtgaaaaatca

SEQ ID NO: 9049 - RNA, 20 nt, Homo sapiens
  source 1..20: mol_type = genomic RNA
atcagcttgtgaaaaatcag

SEQ ID NO: 9050 - RNA, 20 nt, Homo sapiens
  source 1..20: mol_type = genomic RNA
tcagcttgtgaaaaatcagg

SEQ ID NO: 9051 - RNA, 20 nt, Homo sapiens
  source 1..20: mol_type = genomic RNA
cagcttgtgaaaaatcagga

SEQ ID NO: 9052 - RNA, 20 nt, Homo sapiens
  source 1..20: mol_type = genomic RNA
agcttgtgaaaaatcaggac

SEQ ID NO: 9053 - RNA, 20 nt, Homo sapiens
  source 1..20: mol_type = genomic RNA
gcttgtgaaaaatcaggact

SEQ ID NO: 9054 - RNA, 20 nt, Homo sapiens
  source 1..20: mol_type = genomic RNA
cttgtgaaaaatcaggactt

SEQ ID NO: 9055 - RNA, 20 nt, Homo sapiens
  source 1..20: mol_type = genomic RNA
ttgtgaaaaatcaggacttg

SEQ ID NO: 9056 - RNA, 20 nt, Homo sapiens
  source 1..20: mol_type = genomic RNA
tgtgaaaaatcaggacttga

SEQ ID NO: 9057 - RNA, 20 nt, Homo sapiens
  source 1..20: mol_type = genomic RNA
gtgaaaaatcaggacttgaa

SEQ ID NO: 9058 - RNA, 20 nt, Homo sapiens
  source 1..20: mol_type = genomic RNA
tgaaaaatcaggacttgaag

SEQ ID NO: 9059 - RNA, 20 nt, Homo sapiens
  source 1..20: mol_type = genomic RNA
gaaaaatcaggacttgaaga

SEQ ID NO: 9060 - RNA, 20 nt, Homo sapiens
  source 1..20: mol_type = genomic RNA
aaaaatcaggacttgaagag

SEQ ID NO: 9061 - RNA, 20 nt, Homo sapiens
  source 1..20: mol_type = genomic RNA
aaaatcaggacttgaagaga

SEQ ID NO: 9062 - RNA, 20 nt, Homo sapiens
  source 1..20: mol_type = genomic RNA
aaatcaggacttgaagagag

SEQ ID NO: 9063 - RNA, 20 nt, Homo sapiens
  source 1..20: mol_type = genomic RNA
aatcaggacttgaagagagc

SEQ ID NO: 9064 - RNA, 20 nt, Homo sapiens
  source 1..20: mol_type = genomic RNA
atcaggacttgaagagagcc

SEQ ID NO: 9065 - RNA, 20 nt, Homo sapiens
  source 1..20: mol_type = genomic RNA
tcaggacttgaagagagccg

SEQ ID NO: 9066 - RNA, 20 nt, Homo sapiens
  source 1..20: mol_type = genomic RNA
caggacttgaagagagccgt

SEQ ID NO: 9067 - RNA, 20 nt, Homo sapiens
  source 1..20: mol_type = genomic RNA
aggacttgaagagagccgtc

SEQ ID NO: 9068 - RNA, 20 nt, Homo sapiens
  source 1..20: mol_type = genomic RNA
ggacttgaagagagccgtct

SEQ ID NO: 9069 - RNA, 20 nt, Homo sapiens
  source 1..20: mol_type = genomic RNA
gacttgaagagagccgtcta

SEQ ID NO: 9070 - RNA, 20 nt, Homo sapiens
  source 1..20: mol_type = genomic RNA
acttgaagagagccgtctaa

SEQ ID NO: 9071 - RNA, 20 nt, Homo sapiens
  source 1..20: mol_type = genomic RNA
cttgaagagagccgtctaag

SEQ ID NO: 9072 - RNA, 20 nt, Homo sapiens
  source 1..20: mol_type = genomic RNA
ttgaagagagccgtctaaga

SEQ ID NO: 9073 - RNA, 20 nt, Homo sapiens
  source 1..20: mol_type = genomic RNA
tgaagagagccgtctaagaa

SEQ ID NO: 9074 - RNA, 20 nt, Homo sapiens
  source 1..20: mol_type = genomic RNA
gaagagagccgtctaagaaa

SEQ ID NO: 9075 - RNA, 20 nt, Homo sapiens
  source 1..20: mol_type = genomic RNA
aagagagccgtctaagaaat

SEQ ID NO: 9076 - RNA, 20 nt, Homo sapiens
  source 1..20: mol_type = genomic RNA
agagagccgtctaagaaata

SEQ ID NO: 9077 - RNA, 20 nt, Homo sapiens
  source 1..20: mol_type = genomic RNA
gagagccgtctaagaaatac

SEQ ID NO: 9078 - RNA, 20 nt, Homo sapiens
  source 1..20: mol_type = genomic RNA
agagccgtctaagaaatacc

SEQ ID NO: 9079 - RNA, 20 nt, Homo sapiens
  source 1..20: mol_type = genomic RNA
gagccgtctaagaaatacca

SEQ ID NO: 9080 - RNA, 20 nt, Homo sapiens
  source 1..20: mol_type = genomic RNA
agccgtctaagaaataccac

SEQ ID NO: 9081 - RNA, 20 nt, Homo sapiens
  source 1..20: mol_type = genomic RNA
gccgtctaagaaataccacg

SEQ ID NO: 9082 - RNA, 20 nt, Homo sapiens
  source 1..20: mol_type = genomic RNA
ccgtctaagaaataccacgt

SEQ ID NO: 9083 - RNA, 20 nt, Homo sapiens
  source 1..20: mol_type = genomic RNA
cgtctaagaaataccacgtg

SEQ ID NO: 9084 - RNA, 20 nt, Homo sapiens
  source 1..20: mol_type = genomic RNA
gtctaagaaataccacgtgc

SEQ ID NO: 9085 - RNA, 20 nt, Homo sapiens
  source 1..20: mol_type = genomic RNA
tctaagaaataccacgtgct

SEQ ID NO: 9086 - RNA, 20 nt, Homo sapiens
  source 1..20: mol_type = genomic RNA
ctaagaaataccacgtgctt

SEQ ID NO: 9087 - RNA, 20 nt, Homo sapiens
  source 1..20: mol_type = genomic RNA
taagaaataccacgtgcttt

SEQ ID NO: 9088 - RNA, 20 nt, Homo sapiens
  source 1..20: mol_type = genomic RNA
aagaaataccacgtgctttt

SEQ ID NO: 9089 - RNA, 20 nt, Homo sapiens
  source 1..20: mol_type = genomic RNA
agaaataccacgtgcttttt

SEQ ID NO: 9090 - RNA, 20 nt, Homo sapiens
  source 1..20: mol_type = genomic RNA
gaaataccacgtgctttttt

SEQ ID NO: 9091 - RNA, 20 nt, Homo sapiens
  source 1..20: mol_type = genomic RNA
aaataccacgtgcttttttt

SEQ ID NO: 9092 - RNA, 20 nt, Homo sapiens
  source 1..20: mol_type = genomic RNA
aataccacgtgctttttttc

SEQ ID NO: 9093 - RNA, 20 nt, Homo sapiens
  source 1..20: mol_type = genomic RNA
ataccacgtgctttttttct

SEQ ID NO: 9094 - RNA, 20 nt, Homo sapiens
  source 1..20: mol_type = genomic RNA
taccacgtgctttttttctt

SEQ ID NO: 9095 - RNA, 20 nt, Homo sapiens
  source 1..20: mol_type = genomic RNA
accacgtgctttttttcttt

SEQ ID NO: 9096 - RNA, 20 nt, Homo sapiens
  source 1..20: mol_type = genomic RNA
ccacgtgctttttttcttta

SEQ ID NO: 9097 - RNA, 20 nt, Homo sapiens
  source 1..20: mol_type = genomic RNA
cacgtgctttttttctttac

SEQ ID NO: 9098 - RNA, 20 nt, Homo sapiens
  source 1..20: mol_type = genomic RNA
acgtgctttttttctttacc

SEQ ID NO: 9099 - RNA, 20 nt, Homo sapiens
  source 1..20: mol_type = genomic RNA
cgtgctttttttctttacca

SEQ ID NO: 9100 - RNA, 20 nt, Homo sapiens
  source 1..20: mol_type = genomic RNA
gtgctttttttctttaccat

SEQ ID NO: 9101 - RNA, 20 nt, Homo sapiens
  source 1..20: mol_type = genomic RNA
tgctttttttctttaccatt

SEQ ID NO: 9102 - RNA, 20 nt, Homo sapiens
  source 1..20: mol_type = genomic RNA
gctttttttctttaccattt

SEQ ID NO: 9103 - RNA, 20 nt, Homo sapiens
  source 1..20: mol_type = genomic RNA
ctttttttctttaccatttt

SEQ ID NO: 9104 - RNA, 20 nt, Homo sapiens
  source 1..20: mol_type = genomic RNA
tttttttctttaccattttg

SEQ ID NO: 9105 - RNA, 20 nt, Homo sapiens
  source 1..20: mol_type = genomic RNA
ttttttctttaccattttgc

SEQ ID NO: 9106 - RNA, 20 nt, Homo sapiens
  source 1..20: mol_type = genomic RNA
tttttctttaccattttgct

SEQ ID NO: 9107 - RNA, 20 nt, Homo sapiens
  source 1..20: mol_type = genomic RNA
ttttctttaccattttgctt

SEQ ID NO: 9108 - RNA, 20 nt, Homo sapiens
  source 1..20: mol_type = genomic RNA
tttctttaccattttgcttt

SEQ ID NO: 9109 - RNA, 20 nt, Homo sapiens
  source 1..20: mol_type = genomic RNA
ttctttaccattttgctttc

SEQ ID NO: 9110 - RNA, 20 nt, Homo sapiens
  source 1..20: mol_type = genomic RNA
tctttaccattttgctttcc

SEQ ID NO: 9111 - RNA, 20 nt, Homo sapiens
  source 1..20: mol_type = genomic RNA
ctttaccattttgctttccc

SEQ ID NO: 9112 - RNA, 20 nt, Homo sapiens
  source 1..20: mol_type = genomic RNA
tttaccattttgctttccca

SEQ ID NO: 9113 - RNA, 20 nt, Homo sapiens
  source 1..20: mol_type = genomic RNA
ttaccattttgctttcccag

SEQ ID NO: 9114 - RNA, 20 nt, Homo sapiens
  source 1..20: mol_type = genomic RNA
taccattttgctttcccagc

SEQ ID NO: 9115 - RNA, 20 nt, Homo sapiens
  source 1..20: mol_type = genomic RNA
accattttgctttcccagcc

SEQ ID NO: 9116 - RNA, 20 nt, Homo sapiens
  source 1..20: mol_type = genomic RNA
ccattttgctttcccagcct

SEQ ID NO: 9117 - RNA, 20 nt, Homo sapiens
  source 1..20: mol_type = genomic RNA
cattttgctttcccagcctc

SEQ ID NO: 9118 - RNA, 20 nt, Homo sapiens
  source 1..20: mol_type = genomic RNA
attttgctttcccagcctcc

SEQ ID NO: 9119 - RNA, 20 nt, Homo sapiens
  source 1..20: mol_type = genomic RNA
ttttgctttcccagcctcca

SEQ ID NO: 9120 - RNA, 20 nt, Homo sapiens
  source 1..20: mol_type = genomic RNA
tttgctttcccagcctccaa

SEQ ID NO: 9121 - RNA, 20 nt, Homo sapiens
  source 1..20: mol_type = genomic RNA
ttgctttcccagcctccaaa

SEQ ID NO: 9122 - RNA, 20 nt, Homo sapiens
  source 1..20: mol_type = genomic RNA
tgctttcccagcctccaaac

SEQ ID NO: 9123 - RNA, 20 nt, Homo sapiens
  source 1..20: mol_type = genomic RNA
gctttcccagcctccaaaca

SEQ ID NO: 9124 - RNA, 20 nt, Homo sapiens
  source 1..20: mol_type = genomic RNA
ctttcccagcctccaaacat

SEQ ID NO: 9125 - RNA, 20 nt, Homo sapiens
  source 1..20: mol_type = genomic RNA
tttcccagcctccaaacata

SEQ ID NO: 9126 - RNA, 20 nt, Homo sapiens
  source 1..20: mol_type = genomic RNA
ttcccagcctccaaacatag

SEQ ID NO: 9127 - RNA, 20 nt, Homo sapiens
  source 1..20: mol_type = genomic RNA
tcccagcctccaaacatagt

SEQ ID NO: 9128 - RNA, 20 nt, Homo sapiens
  source 1..20: mol_type = genomic RNA
cccagcctccaaacatagtt

SEQ ID NO: 9129 - RNA, 20 nt, Homo sapiens
  source 1..20: mol_type = genomic RNA
ccagcctccaaacatagtta

SEQ ID NO: 9130 - RNA, 20 nt, Homo sapiens
  source 1..20: mol_type = genomic RNA
cagcctccaaacatagttaa

SEQ ID NO: 9131 - RNA, 20 nt, Homo sapiens
  source 1..20: mol_type = genomic RNA
agcctccaaacatagttaat

SEQ ID NO: 9132 - RNA, 20 nt, Homo sapiens
  source 1..20: mol_type = genomic RNA
gcctccaaacatagttaata

SEQ ID NO: 9133 - RNA, 20 nt, Homo sapiens
  source 1..20: mol_type = genomic RNA
cctccaaacatagttaatag

SEQ ID NO: 9134 - RNA, 20 nt, Homo sapiens
  source 1..20: mol_type = genomic RNA
ctccaaacatagttaataga

SEQ ID NO: 9135 - RNA, 20 nt, Homo sapiens
  source 1..20: mol_type = genomic RNA
tccaaacatagttaatagaa

SEQ ID NO: 9136 - RNA, 20 nt, Homo sapiens
  source 1..20: mol_type = genomic RNA
ccaaacatagttaatagaaa

SEQ ID NO: 9137 - RNA, 20 nt, Homo sapiens
  source 1..20: mol_type = genomic RNA
caaacatagttaatagaaat

SEQ ID NO: 9138 - RNA, 20 nt, Homo sapiens
  source 1..20: mol_type = genomic RNA
aaacatagttaatagaaatt

SEQ ID NO: 9139 - RNA, 20 nt, Homo sapiens
  source 1..20: mol_type = genomic RNA
aacatagttaatagaaattt

SEQ ID NO: 9140 - RNA, 20 nt, Homo sapiens
  source 1..20: mol_type = genomic RNA
acatagttaatagaaatttc

SEQ ID NO: 9141 - RNA, 20 nt, Homo sapiens
  source 1..20: mol_type = genomic RNA
catagttaatagaaatttcc

SEQ ID NO: 9142 - RNA, 20 nt, Homo sapiens
  source 1..20: mol_type = genomic RNA
atagttaatagaaatttccc

SEQ ID NO: 9143 - RNA, 20 nt, Homo sapiens
  source 1..20: mol_type = genomic RNA
tagttaatagaaatttccct

SEQ ID NO: 9144 - RNA, 20 nt, Homo sapiens
  source 1..20: mol_type = genomic RNA
agttaatagaaatttccctt

SEQ ID NO: 9145 - RNA, 20 nt, Homo sapiens
  source 1..20: mol_type = genomic RNA
gttaatagaaatttcccttc

SEQ ID NO: 9146 - RNA, 20 nt, Homo sapiens
  source 1..20: mol_type = genomic RNA
ttaatagaaatttcccttca

SEQ ID NO: 9147 - RNA, 20 nt, Homo sapiens
  source 1..20: mol_type = genomic RNA
taatagaaatttcccttcaa

SEQ ID NO: 9148 - RNA, 20 nt, Homo sapiens
  source 1..20: mol_type = genomic RNA
aatagaaatttcccttcaaa

SEQ ID NO: 9149 - RNA, 20 nt, Homo sapiens
  source 1..20: mol_type = genomic RNA
atagaaatttcccttcaaag

SEQ ID NO: 9150 - RNA, 20 nt, Homo sapiens
  source 1..20: mol_type = genomic RNA
tagaaatttcccttcaaaga

SEQ ID NO: 9151 - RNA, 20 nt, Homo sapiens
  source 1..20: mol_type = genomic RNA
agaaatttcccttcaaagaa

SEQ ID NO: 9152 - RNA, 20 nt, Homo sapiens
  source 1..20: mol_type = genomic RNA
gaaatttcccttcaaagaac

SEQ ID NO: 9153 - RNA, 20 nt, Homo sapiens
  source 1..20: mol_type = genomic RNA
aaatttcccttcaaagaact

SEQ ID NO: 9154 - RNA, 20 nt, Homo sapiens
  source 1..20: mol_type = genomic RNA
aatttcccttcaaagaactg

SEQ ID NO: 9155 - RNA, 20 nt, Homo sapiens
  source 1..20: mol_type = genomic RNA
atttcccttcaaagaactgt

SEQ ID NO: 9156 - RNA, 20 nt, Homo sapiens
  source 1..20: mol_type = genomic RNA
tttcccttcaaagaactgtc

SEQ ID NO: 9157 - RNA, 20 nt, Homo sapiens
  source 1..20: mol_type = genomic RNA
ttcccttcaaagaactgtct

SEQ ID NO: 9158 - RNA, 20 nt, Homo sapiens
  source 1..20: mol_type = genomic RNA
tcccttcaaagaactgtctg

SEQ ID NO: 9159 - RNA, 20 nt, Homo sapiens
  source 1..20: mol_type = genomic RNA
cccttcaaagaactgtctgg

SEQ ID NO: 9160 - RNA, 20 nt, Homo sapiens
  source 1..20: mol_type = genomic RNA
ccttcaaagaactgtctggg

SEQ ID NO: 9161 - RNA, 20 nt, Homo sapiens
  source 1..20: mol_type = genomic RNA
cttcaaagaactgtctgggg

SEQ ID NO: 9162 - RNA, 20 nt, Homo sapiens
  source 1..20: mol_type = genomic RNA
ttcaaagaactgtctgggga

SEQ ID NO: 9163 - RNA, 20 nt, Homo sapiens
  source 1..20: mol_type = genomic RNA
tcaaagaactgtctggggat

SEQ ID NO: 9164 - RNA, 20 nt, Homo sapiens
  source 1..20: mol_type = genomic RNA
caaagaactgtctggggatg

SEQ ID NO: 9165 - RNA, 20 nt, Homo sapiens
  source 1..20: mol_type = genomic RNA
aaagaactgtctggggatgt

SEQ ID NO: 9166 - RNA, 20 nt, Homo sapiens
  source 1..20: mol_type = genomic RNA
aagaactgtctggggatgtg

SEQ ID NO: 9167 - RNA, 20 nt, Homo sapiens
  source 1..20: mol_type = genomic RNA
agaactgtctggggatgtga

SEQ ID NO: 9168 - RNA, 20 nt, Homo sapiens
  source 1..20: mol_type = genomic RNA
gaactgtctggggatgtgat

SEQ ID NO: 9169 - RNA, 20 nt, Homo sapiens
  source 1..20: mol_type = genomic RNA
aactgtctggggatgtgatg

SEQ ID NO: 9170 - RNA, 20 nt, Homo sapiens
  source 1..20: mol_type = genomic RNA
actgtctggggatgtgatgc

SEQ ID NO: 9171 - RNA, 20 nt, Homo sapiens
  source 1..20: mol_type = genomic RNA
ctgtctggggatgtgatgct

SEQ ID NO: 9172 - RNA, 20 nt, Homo sapiens
  source 1..20: mol_type = genomic RNA
tgtctggggatgtgatgctt

SEQ ID NO: 9173 - RNA, 20 nt, Homo sapiens
  source 1..20: mol_type = genomic RNA
gtctggggatgtgatgcttt

SEQ ID NO: 9174 - RNA, 20 nt, Homo sapiens
  source 1..20: mol_type = genomic RNA
tctggggatgtgatgctttg

SEQ ID NO: 9175 - RNA, 20 nt, Homo sapiens
  source 1..20: mol_type = genomic RNA
ctggggatgtgatgctttga

SEQ ID NO: 9176 - RNA, 20 nt, Homo sapiens
  source 1..20: mol_type = genomic RNA
tggggatgtgatgctttgaa

SEQ ID NO: 9177 - RNA, 20 nt, Homo sapiens
  source 1..20: mol_type = genomic RNA
ggggatgtgatgctttgaaa

SEQ ID NO: 9178 - RNA, 20 nt, Homo sapiens
  source 1..20: mol_type = genomic RNA
gggatgtgatgctttgaaaa

SEQ ID NO: 9179 - RNA, 20 nt, Homo sapiens
  source 1..20: mol_type = genomic RNA
ggatgtgatgctttgaaaaa

SEQ ID NO: 9180 - RNA, 20 nt, Homo sapiens
  source 1..20: mol_type = genomic RNA
gatgtgatgctttgaaaaat

SEQ ID NO: 9181 - RNA, 20 nt, Homo sapiens
  source 1..20: mol_type = genomic RNA
atgtgatgctttgaaaaatc

SEQ ID NO: 9182 - RNA, 20 nt, Homo sapiens
  source 1..20: mol_type = genomic RNA
tgtgatgctttgaaaaatct

SEQ ID NO: 9183 - RNA, 20 nt, Homo sapiens
  source 1..20: mol_type = genomic RNA
gtgatgctttgaaaaatcta

SEQ ID NO: 9184 - RNA, 20 nt, Homo sapiens
  source 1..20: mol_type = genomic RNA
tgatgctttgaaaaatctaa

SEQ ID NO: 9185 - RNA, 20 nt, Homo sapiens
  source 1..20: mol_type = genomic RNA
gatgctttgaaaaatctaat

SEQ ID NO: 9186 - RNA, 20 nt, Homo sapiens
  source 1..20: mol_type = genomic RNA
atgctttgaaaaatctaatc

SEQ ID NO: 9187 - RNA, 20 nt, Homo sapiens
  source 1..20: mol_type = genomic RNA
tgctttgaaaaatctaatca

SEQ ID NO: 9188 - RNA, 20 nt, Homo sapiens
  source 1..20: mol_type = genomic RNA
gctttgaaaaatctaatcag

SEQ ID NO: 9189 - RNA, 20 nt, Homo sapiens
  source 1..20: mol_type = genomic RNA
ctttgaaaaatctaatcagt

SEQ ID NO: 9190 - RNA, 20 nt, Homo sapiens
  source 1..20: mol_type = genomic RNA
tttgaaaaatctaatcagtg

SEQ ID NO: 9191 - RNA, 20 nt, Homo sapiens
  source 1..20: mol_type = genomic RNA
ttgaaaaatctaatcagtga

SEQ ID NO: 9192 - RNA, 20 nt, Homo sapiens
  source 1..20: mol_type = genomic RNA
tgaaaaatctaatcagtgac

SEQ ID NO: 9193 - RNA, 20 nt, Homo sapiens
  source 1..20: mol_type = genomic RNA
gaaaaatctaatcagtgact

SEQ ID NO: 9194 - RNA, 20 nt, Homo sapiens
  source 1..20: mol_type = genomic RNA
aaaaatctaatcagtgactt

SEQ ID NO: 9195 - RNA, 20 nt, Homo sapiens
  source 1..20: mol_type = genomic RNA
aaaatctaatcagtgactta

SEQ ID NO: 9196 - RNA, 20 nt, Homo sapiens
  source 1..20: mol_type = genomic RNA
aaatctaatcagtgacttaa

SEQ ID NO: 9197 - RNA, 20 nt, Homo sapiens
  source 1..20: mol_type = genomic RNA
aatctaatcagtgacttaag

SEQ ID NO: 9198 - RNA, 20 nt, Homo sapiens
  source 1..20: mol_type = genomic RNA
atctaatcagtgacttaaga

SEQ ID NO: 9199 - RNA, 20 nt, Homo sapiens
  source 1..20: mol_type = genomic RNA
tctaatcagtgacttaagag

SEQ ID NO: 9200 - RNA, 20 nt, Homo sapiens
  source 1..20: mol_type = genomic RNA
ctaatcagtgacttaagaga

SEQ ID NO: 9201 - RNA, 20 nt, Homo sapiens
  source 1..20: mol_type = genomic RNA
taatcagtgacttaagagag

SEQ ID NO: 9202 - RNA, 20 nt, Homo sapiens
  source 1..20: mol_type = genomic RNA
aatcagtgacttaagagaga

SEQ ID NO: 9203 - RNA, 20 nt, Homo sapiens
  source 1..20: mol_type = genomic RNA
atcagtgacttaagagagat

SEQ ID NO: 9204 - RNA, 20 nt, Homo sapiens
  source 1..20: mol_type = genomic RNA
tcagtgacttaagagagatt

SEQ ID NO: 9205 - RNA, 20 nt, Homo sapiens
  source 1..20: mol_type = genomic RNA
cagtgacttaagagagattt

SEQ ID NO: 9206 - RNA, 20 nt, Homo sapiens
  source 1..20: mol_type = genomic RNA
agtgacttaagagagatttt

SEQ ID NO: 9207 - RNA, 20 nt, Homo sapiens
  source 1..20: mol_type = genomic RNA
gtgacttaagagagattttc

SEQ ID NO: 9208 - RNA, 20 nt, Homo sapiens
  source 1..20: mol_type = genomic RNA
tgacttaagagagattttct

SEQ ID NO: 9209 - RNA, 20 nt, Homo sapiens
  source 1..20: mol_type = genomic RNA
gacttaagagagattttctt

SEQ ID NO: 9210 - RNA, 20 nt, Homo sapiens
  source 1..20: mol_type = genomic RNA
acttaagagagattttcttg

SEQ ID NO: 9211 - RNA, 20 nt, Homo sapiens
  source 1..20: mol_type = genomic RNA
cttaagagagattttcttgt

SEQ ID NO: 9212 - RNA, 20 nt, Homo sapiens
  source 1..20: mol_type = genomic RNA
ttaagagagattttcttgta

SEQ ID NO: 9213 - RNA, 20 nt, Homo sapiens
  source 1..20: mol_type = genomic RNA
taagagagattttcttgtat

SEQ ID NO: 9214 - RNA, 20 nt, Homo sapiens
  source 1..20: mol_type = genomic RNA
aagagagattttcttgtata

SEQ ID NO: 9215 - RNA, 20 nt, Homo sapiens
  source 1..20: mol_type = genomic RNA
agagagattttcttgtatac

SEQ ID NO: 9216 - RNA, 20 nt, Homo sapiens
  source 1..20: mol_type = genomic RNA
gagagattttcttgtataca

SEQ ID NO: 9217 - RNA, 20 nt, Homo sapiens
  source 1..20: mol_type = genomic RNA
agagattttcttgtatacag

SEQ ID NO: 9218 - RNA, 20 nt, Homo sapiens
  source 1..20: mol_type = genomic RNA
gagattttcttgtatacagg

SEQ ID NO: 9219 - RNA, 20 nt, Homo sapiens
  source 1..20: mol_type = genomic RNA
agattttcttgtatacaggg

SEQ ID NO: 9220 - RNA, 20 nt, Homo sapiens
  source 1..20: mol_type = genomic RNA
gattttcttgtatacaggga

SEQ ID NO: 9221 - RNA, 20 nt, Homo sapiens
  source 1..20: mol_type = genomic RNA
attttcttgtatacagggag

SEQ ID NO: 9222 - RNA, 20 nt, Homo sapiens
  source 1..20: mol_type = genomic RNA
ttttcttgtatacagggaga

SEQ ID NO: 9223 - RNA, 20 nt, Homo sapiens
  source 1..20: mol_type = genomic RNA
tttcttgtatacagggagag

SEQ ID NO: 9224 - RNA, 20 nt, Homo sapiens
  source 1..20: mol_type = genomic RNA
ttcttgtatacagggagagt

SEQ ID NO: 9225 - RNA, 20 nt, Homo sapiens
  source 1..20: mol_type = genomic RNA
tcttgtatacagggagagtg

SEQ ID NO: 9226 - RNA, 20 nt, Homo sapiens
  source 1..20: mol_type = genomic RNA
cttgtatacagggagagtga

SEQ ID NO: 9227 - RNA, 20 nt, Homo sapiens
  source 1..20: mol_type = genomic RNA
ttgtatacagggagagtgag

SEQ ID NO: 9228 - RNA, 20 nt, Homo sapiens
  source 1..20: mol_type = genomic RNA
tgtatacagggagagtgaga

SEQ ID NO: 9229 - RNA, 20 nt, Homo sapiens
  source 1..20: mol_type = genomic RNA
gtatacagggagagtgagat

SEQ ID NO: 9230 - RNA, 20 nt, Homo sapiens
  source 1..20: mol_type = genomic RNA
tatacagggagagtgagata

SEQ ID NO: 9231 - RNA, 20 nt, Homo sapiens
  source 1..20: mol_type = genomic RNA
atacagggagagtgagataa

SEQ ID NO: 9232 - RNA, 20 nt, Homo sapiens
  source 1..20: mol_type = genomic RNA
tacagggagagtgagataac

SEQ ID NO: 9233 - RNA, 20 nt, Homo sapiens
  source 1..20: mol_type = genomic RNA
acagggagagtgagataact

SEQ ID NO: 9234 - RNA, 20 nt, Homo sapiens
  source 1..20: mol_type = genomic RNA
cagggagagtgagataactt

SEQ ID NO: 9235 - RNA, 20 nt, Homo sapiens
  source 1..20: mol_type = genomic RNA
agggagagtgagataactta

SEQ ID NO: 9236 - RNA, 20 nt, Homo sapiens
  source 1..20: mol_type = genomic RNA
gggagagtgagataacttat

SEQ ID NO: 9237 - RNA, 20 nt, Homo sapiens
  source 1..20: mol_type = genomic RNA
ggagagtgagataacttatt

SEQ ID NO: 9238 - RNA, 20 nt, Homo sapiens
  source 1..20: mol_type = genomic RNA
gagagtgagataacttattg

SEQ ID NO: 9239 - RNA, 20 nt, Homo sapiens
  source 1..20: mol_type = genomic RNA
agagtgagataacttattgt

SEQ ID NO: 9240 - RNA, 20 nt, Homo sapiens
  source 1..20: mol_type = genomic RNA
gagtgagataacttattgtg

SEQ ID NO: 9241 - RNA, 20 nt, Homo sapiens
  source 1..20: mol_type = genomic RNA
agtgagataacttattgtga

SEQ ID NO: 9242 - RNA, 20 nt, Homo sapiens
  source 1..20: mol_type = genomic RNA
gtgagataacttattgtgaa

SEQ ID NO: 9243 - RNA, 20 nt, Homo sapiens
  source 1..20: mol_type = genomic RNA
tgagataacttattgtgaag

SEQ ID NO: 9244 - RNA, 20 nt, Homo sapiens
  source 1..20: mol_type = genomic RNA
gagataacttattgtgaagg

SEQ ID NO: 9245 - RNA, 20 nt, Homo sapiens
  source 1..20: mol_type = genomic RNA
agataacttattgtgaaggg

SEQ ID NO: 9246 - RNA, 20 nt, Homo sapiens
  source 1..20: mol_type = genomic RNA
gataacttattgtgaagggt

SEQ ID NO: 9247 - RNA, 20 nt, Homo sapiens
  source 1..20: mol_type = genomic RNA
ataacttattgtgaagggtt

SEQ ID NO: 9248 - RNA, 20 nt, Homo sapiens
  source 1..20: mol_type = genomic RNA
taacttattgtgaagggtta

SEQ ID NO: 9249 - RNA, 20 nt, Homo sapiens
  source 1..20: mol_type = genomic RNA
aacttattgtgaagggttag

SEQ ID NO: 9250 - RNA, 20 nt, Homo sapiens
  source 1..20: mol_type = genomic RNA
acttattgtgaagggttagc

SEQ ID NO: 9251 - RNA, 20 nt, Homo sapiens
  source 1..20: mol_type = genomic RNA
cttattgtgaagggttagct

SEQ ID NO: 9252 - RNA, 20 nt, Homo sapiens
  source 1..20: mol_type = genomic RNA
ttattgtgaagggttagctt

SEQ ID NO: 9253 - RNA, 20 nt, Homo sapiens
  source 1..20: mol_type = genomic RNA
tattgtgaagggttagcttt

SEQ ID NO: 9254 - RNA, 20 nt, Homo sapiens
  source 1..20: mol_type = genomic RNA
attgtgaagggttagcttta

SEQ ID NO: 9255 - RNA, 20 nt, Homo sapiens
  source 1..20: mol_type = genomic RNA
ttgtgaagggttagctttac

SEQ ID NO: 9256 - RNA, 20 nt, Homo sapiens
  source 1..20: mol_type = genomic RNA
tgtgaagggttagctttact

SEQ ID NO: 9257 - RNA, 20 nt, Homo sapiens
  source 1..20: mol_type = genomic RNA
gtgaagggttagctttactg

SEQ ID NO: 9258 - RNA, 20 nt, Homo sapiens
  source 1..20: mol_type = genomic RNA
tgaagggttagctttactgt

SEQ ID NO: 9259 - RNA, 20 nt, Homo sapiens
  source 1..20: mol_type = genomic RNA
gaagggttagctttactgta

SEQ ID NO: 9260 - RNA, 20 nt, Homo sapiens
  source 1..20: mol_type = genomic RNA
aagggttagctttactgtac

SEQ ID NO: 9261 - RNA, 20 nt, Homo sapiens
  source 1..20: mol_type = genomic RNA
agggttagctttactgtaca

SEQ ID NO: 9262 - RNA, 20 nt, Homo sapiens
  source 1..20: mol_type = genomic RNA
gggttagctttactgtacag

SEQ ID NO: 9263 - RNA, 20 nt, Homo sapiens
  source 1..20: mol_type = genomic RNA
ggttagctttactgtacagg

SEQ ID NO: 9264 - RNA, 20 nt, Homo sapiens
  source 1..20: mol_type = genomic RNA
gttagctttactgtacagga

SEQ ID NO: 9265 - RNA, 20 nt, Homo sapiens
  source 1..20: mol_type = genomic RNA
ttagctttactgtacaggat

SEQ ID NO: 9266 - RNA, 20 nt, Homo sapiens
  source 1..20: mol_type = genomic RNA
tagctttactgtacaggata

SEQ ID NO: 9267 - RNA, 20 nt, Homo sapiens
  source 1..20: mol_type = genomic RNA
agctttactgtacaggatag

SEQ ID NO: 9268 - RNA, 20 nt, Homo sapiens
  source 1..20: mol_type = genomic RNA
gctttactgtacaggatagc

SEQ ID NO: 9269 - RNA, 20 nt, Homo sapiens
  source 1..20: mol_type = genomic RNA
ctttactgtacaggatagca

SEQ ID NO: 9270 - RNA, 20 nt, Homo sapiens
  source 1..20: mol_type = genomic RNA
tttactgtacaggatagcag

SEQ ID NO: 9271 - RNA, 20 nt, Homo sapiens
  source 1..20: mol_type = genomic RNA
ttactgtacaggatagcagg

SEQ ID NO: 9272 - RNA, 20 nt, Homo sapiens
  source 1..20: mol_type = genomic RNA
tactgtacaggatagcaggg

SEQ ID NO: 9273 - RNA, 20 nt, Homo sapiens
  source 1..20: mol_type = genomic RNA
actgtacaggatagcaggga

SEQ ID NO: 9274 - RNA, 20 nt, Homo sapiens
  source 1..20: mol_type = genomic RNA
ctgtacaggatagcagggaa

SEQ ID NO: 9275 - RNA, 20 nt, Homo sapiens
  source 1..20: mol_type = genomic RNA
tgtacaggatagcagggaac

SEQ ID NO: 9276 - RNA, 20 nt, Homo sapiens
  source 1..20: mol_type = genomic RNA
gtacaggatagcagggaact

SEQ ID NO: 9277 - RNA, 20 nt, Homo sapiens
  source 1..20: mol_type = genomic RNA
tacaggatagcagggaactg

SEQ ID NO: 9278 - RNA, 20 nt, Homo sapiens
  source 1..20: mol_type = genomic RNA
acaggatagcagggaactgg

SEQ ID NO: 9279 - RNA, 20 nt, Homo sapiens
  source 1..20: mol_type = genomic RNA
caggatagcagggaactgga

SEQ ID NO: 9280 - RNA, 20 nt, Homo sapiens
  source 1..20: mol_type = genomic RNA
aggatagcagggaactggac

SEQ ID NO: 9281 - RNA, 20 nt, Homo sapiens
  source 1..20: mol_type = genomic RNA
ggatagcagggaactggaca

SEQ ID NO: 9282 - RNA, 20 nt, Homo sapiens
  source 1..20: mol_type = genomic RNA
gatagcagggaactggacat

SEQ ID NO: 9283 - RNA, 20 nt, Homo sapiens
  source 1..20: mol_type = genomic RNA
atagcagggaactggacatc

SEQ ID NO: 9284 - RNA, 20 nt, Homo sapiens
  source 1..20: mol_type = genomic RNA
tagcagggaactggacatct

SEQ ID NO: 9285 - RNA, 20 nt, Homo sapiens
  source 1..20: mol_type = genomic RNA
agcagggaactggacatctc

SEQ ID NO: 9286 - RNA, 20 nt, Homo sapiens
  source 1..20: mol_type = genomic RNA
gcagggaactggacatctca

SEQ ID NO: 9287 - RNA, 20 nt, Homo sapiens
  source 1..20: mol_type = genomic RNA
cagggaactggacatctcag

SEQ ID NO: 9288 - RNA, 20 nt, Homo sapiens
  source 1..20: mol_type = genomic RNA
agggaactggacatctcagg

SEQ ID NO: 9289 - RNA, 20 nt, Homo sapiens
  source 1..20: mol_type = genomic RNA
gggaactggacatctcaggg

SEQ ID NO: 9290 - RNA, 20 nt, Homo sapiens
  source 1..20: mol_type = genomic RNA
ggaactggacatctcagggt

SEQ ID NO: 9291 - RNA, 20 nt, Homo sapiens
  source 1..20: mol_type = genomic RNA
gaactggacatctcagggta

SEQ ID NO: 9292 - RNA, 20 nt, Homo sapiens
  source 1..20: mol_type = genomic RNA
aactggacatctcagggtaa

SEQ ID NO: 9293 - RNA, 20 nt, Homo sapiens
  source 1..20: mol_type = genomic RNA
actggacatctcagggtaaa

SEQ ID NO: 9294 - RNA, 20 nt, Homo sapiens
  source 1..20: mol_type = genomic RNA
ctggacatctcagggtaaaa

SEQ ID NO: 9295 - RNA, 20 nt, Homo sapiens
  source 1..20: mol_type = genomic RNA
tggacatctcagggtaaaag

SEQ ID NO: 9296 - RNA, 20 nt, Homo sapiens
  source 1..20: mol_type = genomic RNA
ggacatctcagggtaaaagt

SEQ ID NO: 9297 - RNA, 20 nt, Homo sapiens
  source 1..20: mol_type = genomic RNA
gacatctcagggtaaaagtc

SEQ ID NO: 9298 - RNA, 20 nt, Homo sapiens
  source 1..20: mol_type = genomic RNA
acatctcagggtaaaagtca

SEQ ID NO: 9299 - RNA, 20 nt, Homo sapiens
  source 1..20: mol_type = genomic RNA
catctcagggtaaaagtcag

SEQ ID NO: 9300 - RNA, 20 nt, Homo sapiens
  source 1..20: mol_type = genomic RNA
atctcagggtaaaagtcagt

SEQ ID NO: 9301 - RNA, 20 nt, Homo sapiens
  source 1..20: mol_type = genomic RNA
tctcagggtaaaagtcagta

SEQ ID NO: 9302 - RNA, 20 nt, Homo sapiens
  source 1..20: mol_type = genomic RNA
ctcagggtaaaagtcagtac

SEQ ID NO: 9303 - RNA, 20 nt, Homo sapiens
  source 1..20: mol_type = genomic RNA
tcagggtaaaagtcagtacg

SEQ ID NO: 9304 - RNA, 20 nt, Homo sapiens
  source 1..20: mol_type = genomic RNA
cagggtaaaagtcagtacgg

SEQ ID NO: 9305 - RNA, 20 nt, Homo sapiens
  source 1..20: mol_type = genomic RNA
agggtaaaagtcagtacgga

SEQ ID NO: 9306 - RNA, 20 nt, Homo sapiens
  source 1..20: mol_type = genomic RNA
gggtaaaagtcagtacggat

SEQ ID NO: 9307 - RNA, 20 nt, Homo sapiens
  source 1..20: mol_type = genomic RNA
ggtaaaagtcagtacggatt

SEQ ID NO: 9308 - RNA, 20 nt, Homo sapiens
  source 1..20: mol_type = genomic RNA
gtaaaagtcagtacggattt

SEQ ID NO: 9309 - RNA, 20 nt, Homo sapiens
  source 1..20: mol_type = genomic RNA
taaaagtcagtacggatttt

SEQ ID NO: 9310 - RNA, 20 nt, Homo sapiens
  source 1..20: mol_type = genomic RNA
aaaagtcagtacggatttta

SEQ ID NO: 9311 - RNA, 20 nt, Homo sapiens
  source 1..20: mol_type = genomic RNA
aaagtcagtacggattttaa

SEQ ID NO: 9312 - RNA, 20 nt, Homo sapiens
  source 1..20: mol_type = genomic RNA
aagtcagtacggattttaat

SEQ ID NO: 9313 - RNA, 20 nt, Homo sapiens
  source 1..20: mol_type = genomic RNA
agtcagtacggattttaata

SEQ ID NO: 9314 - RNA, 20 nt, Homo sapiens
  source 1..20: mol_type = genomic RNA
gtcagtacggattttaatag

SEQ ID NO: 9315 - RNA, 20 nt, Homo sapiens
  source 1..20: mol_type = genomic RNA
tcagtacggattttaatagc

SEQ ID NO: 9316 - RNA, 20 nt, Homo sapiens
  source 1..20: mol_type = genomic RNA
cagtacggattttaatagcc

SEQ ID NO: 9317 - RNA, 20 nt, Homo sapiens
  source 1..20: mol_type = genomic RNA
agtacggattttaatagcct

SEQ ID NO: 9318 - RNA, 20 nt, Homo sapiens
  source 1..20: mol_type = genomic RNA
gtacggattttaatagcctg

SEQ ID NO: 9319 - RNA, 20 nt, Homo sapiens
  source 1..20: mol_type = genomic RNA
tacggattttaatagcctgg

SEQ ID NO: 9320 - RNA, 20 nt, Homo sapiens
  source 1..20: mol_type = genomic RNA
acggattttaatagcctggg

SEQ ID NO: 9321 - RNA, 20 nt, Homo sapiens
  source 1..20: mol_type = genomic RNA
cggattttaatagcctgggg

SEQ ID NO: 9322 - RNA, 20 nt, Homo sapiens
  source 1..20: mol_type = genomic RNA
ggattttaatagcctgggga

SEQ ID NO: 9323 - RNA, 20 nt, Homo sapiens
  source 1..20: mol_type = genomic RNA
gattttaatagcctggggag

SEQ ID NO: 9324 - RNA, 20 nt, Homo sapiens
  source 1..20: mol_type = genomic RNA
attttaatagcctggggagg

SEQ ID NO: 9325 - RNA, 20 nt, Homo sapiens
  source 1..20: mol_type = genomic RNA
ttttaatagcctggggagga

SEQ ID NO: 9326 - RNA, 20 nt, Homo sapiens
  source 1..20: mol_type = genomic RNA
tttaatagcctggggaggaa

SEQ ID NO: 9327 - RNA, 20 nt, Homo sapiens
  source 1..20: mol_type = genomic RNA
ttaatagcctggggaggaaa

SEQ ID NO: 9328 - RNA, 20 nt, Homo sapiens
  source 1..20: mol_type = genomic RNA
taatagcctggggaggaaaa

SEQ ID NO: 9329 - RNA, 20 nt, Homo sapiens
  source 1..20: mol_type = genomic RNA
aatagcctggggaggaaaac

SEQ ID NO: 9330 - RNA, 20 nt, Homo sapiens
  source 1..20: mol_type = genomic RNA
atagcctggggaggaaaaca

SEQ ID NO: 9331 - RNA, 20 nt, Homo sapiens
  source 1..20: mol_type = genomic RNA
tagcctggggaggaaaacac

SEQ ID NO: 9332 - RNA, 20 nt, Homo sapiens
  source 1..20: mol_type = genomic RNA
agcctggggaggaaaacaca

SEQ ID NO: 9333 - RNA, 20 nt, Homo sapiens
  source 1..20: mol_type = genomic RNA
gcctggggaggaaaacacat

SEQ ID NO: 9334 - RNA, 20 nt, Homo sapiens
  source 1..20: mol_type = genomic RNA
cctggggaggaaaacacatt

SEQ ID NO: 9335 - RNA, 20 nt, Homo sapiens
  source 1..20: mol_type = genomic RNA
ctggggaggaaaacacattc

SEQ ID NO: 9336 - RNA, 20 nt, Homo sapiens
  source 1..20: mol_type = genomic RNA
tggggaggaaaacacattct

SEQ ID NO: 9337 - RNA, 20 nt, Homo sapiens
  source 1..20: mol_type = genomic RNA
ggggaggaaaacacattctt

SEQ ID NO: 9338 - RNA, 20 nt, Homo sapiens
  source 1..20: mol_type = genomic RNA
gggaggaaaacacattcttt

SEQ ID NO: 9339 - RNA, 20 nt, Homo sapiens
  source 1..20: mol_type = genomic RNA
ggaggaaaacacattctttg

SEQ ID NO: 9340 - RNA, 20 nt, Homo sapiens
  source 1..20: mol_type = genomic RNA
gaggaaaacacattctttgc

SEQ ID NO: 9341 - RNA, 20 nt, Homo sapiens
  source 1..20: mol_type = genomic RNA
aggaaaacacattctttgcc

SEQ ID NO: 9342 - RNA, 20 nt, Homo sapiens
  source 1..20: mol_type = genomic RNA
ggaaaacacattctttgcca

SEQ ID NO: 9343 - RNA, 20 nt, Homo sapiens
  source 1..20: mol_type = genomic RNA
gaaaacacattctttgccac

SEQ ID NO: 9344 - RNA, 20 nt, Homo sapiens
  source 1..20: mol_type = genomic RNA
aaaacacattctttgccaca

SEQ ID NO: 9345 - RNA, 20 nt, Homo sapiens
  source 1..20: mol_type = genomic RNA
aaacacattctttgccacag

SEQ ID NO: 9346 - RNA, 20 nt, Homo sapiens
  source 1..20: mol_type = genomic RNA
aacacattctttgccacaga

SEQ ID NO: 9347 - RNA, 20 nt, Homo sapiens
  source 1..20: mol_type = genomic RNA
acacattctttgccacagac

SEQ ID NO: 9348 - RNA, 20 nt, Homo sapiens
  source 1..20: mol_type = genomic RNA
cacattctttgccacagaca

SEQ ID NO: 9349 - RNA, 20 nt, Homo sapiens
  source 1..20: mol_type = genomic RNA
acattctttgccacagacag

SEQ ID NO: 9350 - RNA, 20 nt, Homo sapiens
  source 1..20: mol_type = genomic RNA
cattctttgccacagacagg

SEQ ID NO: 9351 - RNA, 20 nt, Homo sapiens
  source 1..20: mol_type = genomic RNA
attctttgccacagacaggc

SEQ ID NO: 9352 - RNA, 20 nt, Homo sapiens
  source 1..20: mol_type = genomic RNA
ttctttgccacagacaggca

SEQ ID NO: 9353 - RNA, 20 nt, Homo sapiens
  source 1..20: mol_type = genomic RNA
tctttgccacagacaggcaa

SEQ ID NO: 9354 - RNA, 20 nt, Homo sapiens
  source 1..20: mol_type = genomic RNA
ctttgccacagacaggcaaa

SEQ ID NO: 9355 - RNA, 20 nt, Homo sapiens
  source 1..20: mol_type = genomic RNA
tttgccacagacaggcaaag

SEQ ID NO: 9356 - RNA, 20 nt, Homo sapiens
  source 1..20: mol_type = genomic RNA
ttgccacagacaggcaaagc

SEQ ID NO: 9357 - RNA, 20 nt, Homo sapiens
  source 1..20: mol_type = genomic RNA
tgccacagacaggcaaagca

SEQ ID NO: 9358 - RNA, 20 nt, Homo sapiens
  source 1..20: mol_type = genomic RNA
gccacagacaggcaaagcaa

SEQ ID NO: 9359 - RNA, 20 nt, Homo sapiens
  source 1..20: mol_type = genomic RNA
ccacagacaggcaaagcaac

SEQ ID NO: 9360 - RNA, 20 nt, Homo sapiens
  source 1..20: mol_type = genomic RNA
cacagacaggcaaagcaaca

SEQ ID NO: 9361 - RNA, 20 nt, Homo sapiens
  source 1..20: mol_type = genomic RNA
acagacaggcaaagcaacac

SEQ ID NO: 9362 - RNA, 20 nt, Homo sapiens
  source 1..20: mol_type = genomic RNA
cagacaggcaaagcaacaca

SEQ ID NO: 9363 - RNA, 20 nt, Homo sapiens
  source 1..20: mol_type = genomic RNA
agacaggcaaagcaacacat

SEQ ID NO: 9364 - RNA, 20 nt, Homo sapiens
  source 1..20: mol_type = genomic RNA
gacaggcaaagcaacacatg

SEQ ID NO: 9365 - RNA, 20 nt, Homo sapiens
  source 1..20: mol_type = genomic RNA
acaggcaaagcaacacatgc

SEQ ID NO: 9366 - RNA, 20 nt, Homo sapiens
  source 1..20: mol_type = genomic RNA
caggcaaagcaacacatgct

SEQ ID NO: 9367 - RNA, 20 nt, Homo sapiens
  source 1..20: mol_type = genomic RNA
aggcaaagcaacacatgctc

SEQ ID NO: 9368 - RNA, 20 nt, Homo sapiens
  source 1..20: mol_type = genomic RNA
ggcaaagcaacacatgctca

SEQ ID NO: 9369 - RNA, 20 nt, Homo sapiens
  source 1..20: mol_type = genomic RNA
gcaaagcaacacatgctcat

SEQ ID NO: 9370 - RNA, 20 nt, Homo sapiens
  source 1..20: mol_type = genomic RNA
caaagcaacacatgctcatc

SEQ ID NO: 9371 - RNA, 20 nt, Homo sapiens
  source 1..20: mol_type = genomic RNA
aaagcaacacatgctcatcc

SEQ ID NO: 9372 - RNA, 20 nt, Homo sapiens
  source 1..20: mol_type = genomic RNA
aagcaacacatgctcatcct

SEQ ID NO: 9373 - RNA, 20 nt, Homo sapiens
  source 1..20: mol_type = genomic RNA
agcaacacatgctcatcctc

SEQ ID NO: 9374 - RNA, 20 nt, Homo sapiens
  source 1..20: mol_type = genomic RNA
gcaacacatgctcatcctcc

SEQ ID NO: 9375 - RNA, 20 nt, Homo sapiens
  source 1..20: mol_type = genomic RNA
caacacatgctcatcctcct

SEQ ID NO: 9376 - RNA, 20 nt, Homo sapiens
  source 1..20: mol_type = genomic RNA
aacacatgctcatcctcctg

SEQ ID NO: 9377 - RNA, 20 nt, Homo sapiens
  source 1..20: mol_type = genomic RNA
acacatgctcatcctcctgc

SEQ ID NO: 9378 - RNA, 20 nt, Homo sapiens
  source 1..20: mol_type = genomic RNA
cacatgctcatcctcctgcc

SEQ ID NO: 9379 - RNA, 20 nt, Homo sapiens
  source 1..20: mol_type = genomic RNA
acatgctcatcctcctgcct

SEQ ID NO: 9380 - RNA, 20 nt, Homo sapiens
  source 1..20: mol_type = genomic RNA
catgctcatcctcctgccta

SEQ ID NO: 9381 - RNA, 20 nt, Homo sapiens
  source 1..20: mol_type = genomic RNA
atgctcatcctcctgcctat

SEQ ID NO: 9382 - RNA, 20 nt, Homo sapiens
  source 1..20: mol_type = genomic RNA
tgctcatcctcctgcctatg

SEQ ID NO: 9383 - RNA, 20 nt, Homo sapiens
  source 1..20: mol_type = genomic RNA
gctcatcctcctgcctatgc

SEQ ID NO: 9384 - RNA, 20 nt, Homo sapiens
  source 1..20: mol_type = genomic RNA
ctcatcctcctgcctatgct

SEQ ID NO: 9385 - RNA, 20 nt, Homo sapiens
  source 1..20: mol_type = genomic RNA
tcatcctcctgcctatgctg

SEQ ID NO: 9386 - RNA, 20 nt, Homo sapiens
  source 1..20: mol_type = genomic RNA
catcctcctgcctatgctga

SEQ ID NO: 9387 - RNA, 20 nt, Homo sapiens
  source 1..20: mol_type = genomic RNA
atcctcctgcctatgctgag

SEQ ID NO: 9388 - RNA, 20 nt, Homo sapiens
  source 1..20: mol_type = genomic RNA
tcctcctgcctatgctgaga

SEQ ID NO: 9389 - RNA, 20 nt, Homo sapiens
  source 1..20: mol_type = genomic RNA
cctcctgcctatgctgagat

SEQ ID NO: 9390 - RNA, 20 nt, Homo sapiens
  source 1..20: mol_type = genomic RNA
ctcctgcctatgctgagata

SEQ ID NO: 9391 - RNA, 20 nt, Homo sapiens
  source 1..20: mol_type = genomic RNA
tcctgcctatgctgagatac

SEQ ID NO: 9392 - RNA, 20 nt, Homo sapiens
  source 1..20: mol_type = genomic RNA
cctgcctatgctgagatacg

SEQ ID NO: 9393 - RNA, 20 nt, Homo sapiens
  source 1..20: mol_type = genomic RNA
ctgcctatgctgagatacgc

SEQ ID NO: 9394 - RNA, 20 nt, Homo sapiens
  source 1..20: mol_type = genomic RNA
tgcctatgctgagatacgca

SEQ ID NO: 9395 - RNA, 20 nt, Homo sapiens
  source 1..20: mol_type = genomic RNA
gcctatgctgagatacgcac

SEQ ID NO: 9396 - RNA, 20 nt, Homo sapiens
  source 1..20: mol_type = genomic RNA
cctatgctgagatacgcact

SEQ ID NO: 9397 - RNA, 20 nt, Homo sapiens
  source 1..20: mol_type = genomic RNA
ctatgctgagatacgcactc

SEQ ID NO: 9398 - RNA, 20 nt, Homo sapiens
  source 1..20: mol_type = genomic RNA
tatgctgagatacgcactca

SEQ ID NO: 9399 - RNA, 20 nt, Homo sapiens
  source 1..20: mol_type = genomic RNA
atgctgagatacgcactcag

SEQ ID NO: 9400 - RNA, 20 nt, Homo sapiens
  source 1..20: mol_type = genomic RNA
tgctgagatacgcactcagc

SEQ ID NO: 9401 - RNA, 20 nt, Homo sapiens
  source 1..20: mol_type = genomic RNA
gctgagatacgcactcagct

SEQ ID NO: 9402 - RNA, 20 nt, Homo sapiens
  source 1..20: mol_type = genomic RNA
ctgagatacgcactcagctc

SEQ ID NO: 9403 - RNA, 20 nt, Homo sapiens
  source 1..20: mol_type = genomic RNA
tgagatacgcactcagctcc

SEQ ID NO: 9404 - RNA, 20 nt, Homo sapiens
  source 1..20: mol_type = genomic RNA
gagatacgcactcagctcca

SEQ ID NO: 9405 - RNA, 20 nt, Homo sapiens
  source 1..20: mol_type = genomic RNA
agatacgcactcagctccat

SEQ ID NO: 9406 - RNA, 20 nt, Homo sapiens
  source 1..20: mol_type = genomic RNA
gatacgcactcagctccatg

SEQ ID NO: 9407 - RNA, 20 nt, Homo sapiens
  source 1..20: mol_type = genomic RNA
atacgcactcagctccatgt

SEQ ID NO: 9408 - RNA, 20 nt, Homo sapiens
  source 1..20: mol_type = genomic RNA
tacgcactcagctccatgtc

SEQ ID NO: 9409 - RNA, 20 nt, Homo sapiens
  source 1..20: mol_type = genomic RNA
acgcactcagctccatgtct

SEQ ID NO: 9410 - RNA, 20 nt, Homo sapiens
  source 1..20: mol_type = genomic RNA
cgcactcagctccatgtctt

SEQ ID NO: 9411 - RNA, 20 nt, Homo sapiens
  source 1..20: mol_type = genomic RNA
gcactcagctccatgtcttg

SEQ ID NO: 9412 - RNA, 20 nt, Homo sapiens
  source 1..20: mol_type = genomic RNA
cactcagctccatgtcttgt

SEQ ID NO: 9413 - RNA, 20 nt, Homo sapiens
  source 1..20: mol_type = genomic RNA
actcagctccatgtcttgta

SEQ ID NO: 9414 - RNA, 20 nt, Homo sapiens
  source 1..20: mol_type = genomic RNA
ctcagctccatgtcttgtac

SEQ ID NO: 9415 - RNA, 20 nt, Homo sapiens
  source 1..20: mol_type = genomic RNA
tcagctccatgtcttgtaca

SEQ ID NO: 9416 - RNA, 20 nt, Homo sapiens
  source 1..20: mol_type = genomic RNA
cagctccatgtcttgtacac

SEQ ID NO: 9417 - RNA, 20 nt, Homo sapiens
  source 1..20: mol_type = genomic RNA
agctccatgtcttgtacaca

SEQ ID NO: 9418 - RNA, 20 nt, Homo sapiens
  source 1..20: mol_type = genomic RNA
gctccatgtcttgtacacac

SEQ ID NO: 9419 - RNA, 20 nt, Homo sapiens
  source 1..20: mol_type = genomic RNA
ctccatgtcttgtacacaca

SEQ ID NO: 9420 - RNA, 20 nt, Homo sapiens
  source 1..20: mol_type = genomic RNA
tccatgtcttgtacacacag

SEQ ID NO: 9421 - RNA, 20 nt, Homo sapiens
  source 1..20: mol_type = genomic RNA
ccatgtcttgtacacacaga

SEQ ID NO: 9422 - RNA, 20 nt, Homo sapiens
  source 1..20: mol_type = genomic RNA
catgtcttgtacacacagaa

SEQ ID NO: 9423 - RNA, 20 nt, Homo sapiens
  source 1..20: mol_type = genomic RNA
atgtcttgtacacacagaaa

SEQ ID NO: 9424 - RNA, 20 nt, Homo sapiens
  source 1..20: mol_type = genomic RNA
tgtcttgtacacacagaaac

SEQ ID NO: 9425 - RNA, 20 nt, Homo sapiens
  source 1..20: mol_type = genomic RNA
gtcttgtacacacagaaaca

SEQ ID NO: 9426 - RNA, 20 nt, Homo sapiens
  source 1..20: mol_type = genomic RNA
tcttgtacacacagaaacat

SEQ ID NO: 9427 - RNA, 20 nt, Homo sapiens
  source 1..20: mol_type = genomic RNA
cttgtacacacagaaacatt

SEQ ID NO: 9428 - RNA, 20 nt, Homo sapiens
  source 1..20: mol_type = genomic RNA
ttgtacacacagaaacattg

SEQ ID NO: 9429 - RNA, 20 nt, Homo sapiens
  source 1..20: mol_type = genomic RNA
tgtacacacagaaacattgc

SEQ ID NO: 9430 - RNA, 20 nt, Homo sapiens
  source 1..20: mol_type = genomic RNA
gtacacacagaaacattgct

SEQ ID NO: 9431 - RNA, 20 nt, Homo sapiens
  source 1..20: mol_type = genomic RNA
tacacacagaaacattgctg

SEQ ID NO: 9432 - RNA, 20 nt, Homo sapiens
  source 1..20: mol_type = genomic RNA
acacacagaaacattgctgg

SEQ ID NO: 9433 - RNA, 20 nt, Homo sapiens
  source 1..20: mol_type = genomic RNA
cacacagaaacattgctggt

SEQ ID NO: 9434 - RNA, 20 nt, Homo sapiens
  source 1..20: mol_type = genomic RNA
acacagaaacattgctggtt

SEQ ID NO: 9435 - RNA, 20 nt, Homo sapiens
  source 1..20: mol_type = genomic RNA
cacagaaacattgctggttt

SEQ ID NO: 9436 - RNA, 20 nt, Homo sapiens
  source 1..20: mol_type = genomic RNA
acagaaacattgctggtttc

SEQ ID NO: 9437 - RNA, 20 nt, Homo sapiens
  source 1..20: mol_type = genomic RNA
cagaaacattgctggtttca

SEQ ID NO: 9438 - RNA, 20 nt, Homo sapiens
  source 1..20: mol_type = genomic RNA
agaaacattgctggtttcaa

SEQ ID NO: 9439 - RNA, 20 nt, Homo sapiens
  source 1..20: mol_type = genomic RNA
gaaacattgctggtttcaag

SEQ ID NO: 9440 - RNA, 20 nt, Homo sapiens
  source 1..20: mol_type = genomic RNA
aaacattgctggtttcaaga

SEQ ID NO: 9441 - RNA, 20 nt, Homo sapiens
  source 1..20: mol_type = genomic RNA
aacattgctggtttcaagaa

SEQ ID NO: 9442 - RNA, 20 nt, Homo sapiens
  source 1..20: mol_type = genomic RNA
acattgctggtttcaagaaa

SEQ ID NO: 9443 - RNA, 20 nt, Homo sapiens
  source 1..20: mol_type = genomic RNA
cattgctggtttcaagaaat

SEQ ID NO: 9444 - RNA, 20 nt, Homo sapiens
  source 1..20: mol_type = genomic RNA
attgctggtttcaagaaatg

SEQ ID NO: 9445 - RNA, 20 nt, Homo sapiens
  source 1..20: mol_type = genomic RNA
ttgctggtttcaagaaatga

SEQ ID NO: 9446 - RNA, 20 nt, Homo sapiens
  source 1..20: mol_type = genomic RNA
tgctggtttcaagaaatgag

SEQ ID NO: 9447 - RNA, 20 nt, Homo sapiens
  source 1..20: mol_type = genomic RNA
gctggtttcaagaaatgagg

SEQ ID NO: 9448 - RNA, 20 nt, Homo sapiens
  source 1..20: mol_type = genomic RNA
ctggtttcaagaaatgaggt

SEQ ID NO: 9449 - RNA, 20 nt, Homo sapiens
  source 1..20: mol_type = genomic RNA
tggtttcaagaaatgaggtg

SEQ ID NO: 9450 - RNA, 20 nt, Homo sapiens
  source 1..20: mol_type = genomic RNA
ggtttcaagaaatgaggtga

SEQ ID NO: 9451 - RNA, 20 nt, Homo sapiens
  source 1..20: mol_type = genomic RNA
gtttcaagaaatgaggtgat

SEQ ID NO: 9452 - RNA, 20 nt, Homo sapiens
  source 1..20: mol_type = genomic RNA
tttcaagaaatgaggtgatc

SEQ ID NO: 9453 - RNA, 20 nt, Homo sapiens
  source 1..20: mol_type = genomic RNA
ttcaagaaatgaggtgatcc

SEQ ID NO: 9454 - RNA, 20 nt, Homo sapiens
  source 1..20: mol_type = genomic RNA
tcaagaaatgaggtgatcct

SEQ ID NO: 9455 - RNA, 20 nt, Homo sapiens
  source 1..20: mol_type = genomic RNA
caagaaatgaggtgatccta

SEQ ID NO: 9456 - RNA, 20 nt, Homo sapiens
  source 1..20: mol_type = genomic RNA
aagaaatgaggtgatcctat

SEQ ID NO: 9457 - RNA, 20 nt, Homo sapiens
  source 1..20: mol_type = genomic RNA
agaaatgaggtgatcctatt

SEQ ID NO: 9458 - RNA, 20 nt, Homo sapiens
  source 1..20: mol_type = genomic RNA
gaaatgaggtgatcctatta

SEQ ID NO: 9459 - RNA, 20 nt, Homo sapiens
  source 1..20: mol_type = genomic RNA
aaatgaggtgatcctattat

SEQ ID NO: 9460 - RNA, 20 nt, Homo sapiens
  source 1..20: mol_type = genomic RNA
aatgaggtgatcctattatc

SEQ ID NO: 9461 - RNA, 20 nt, Homo sapiens
  source 1..20: mol_type = genomic RNA
atgaggtgatcctattatca

SEQ ID NO: 9462 - RNA, 20 nt, Homo sapiens
  source 1..20: mol_type = genomic RNA
tgaggtgatcctattatcaa

SEQ ID NO: 9463 - RNA, 20 nt, Homo sapiens
  source 1..20: mol_type = genomic RNA
gaggtgatcctattatcaaa

SEQ ID NO: 9464 - RNA, 20 nt, Homo sapiens
  source 1..20: mol_type = genomic RNA
aggtgatcctattatcaaat

SEQ ID NO: 9465 - RNA, 20 nt, Homo sapiens
  source 1..20: mol_type = genomic RNA
ggtgatcctattatcaaatt

SEQ ID NO: 9466 - RNA, 20 nt, Homo sapiens
  source 1..20: mol_type = genomic RNA
gtgatcctattatcaaattc

SEQ ID NO: 9467 - RNA, 20 nt, Homo sapiens
  source 1..20: mol_type = genomic RNA
tgatcctattatcaaattca

SEQ ID NO: 9468 - RNA, 20 nt, Homo sapiens
  source 1..20: mol_type = genomic RNA
gatcctattatcaaattcaa

SEQ ID NO: 9469 - RNA, 20 nt, Homo sapiens
  source 1..20: mol_type = genomic RNA
atcctattatcaaattcaat

SEQ ID NO: 9470 - RNA, 20 nt, Homo sapiens
  source 1..20: mol_type = genomic RNA
tcctattatcaaattcaatc

SEQ ID NO: 9471 - RNA, 20 nt, Homo sapiens
  source 1..20: mol_type = genomic RNA
cctattatcaaattcaatct

SEQ ID NO: 9472 - RNA, 20 nt, Homo sapiens
  source 1..20: mol_type = genomic RNA
ctattatcaaattcaatctg

SEQ ID NO: 9473 - RNA, 20 nt, Homo sapiens
  source 1..20: mol_type = genomic RNA
tattatcaaattcaatctga

SEQ ID NO: 9474 - RNA, 20 nt, Homo sapiens
  source 1..20: mol_type = genomic RNA
attatcaaattcaatctgat

SEQ ID NO: 9475 - RNA, 20 nt, Homo sapiens
  source 1..20: mol_type = genomic RNA
ttatcaaattcaatctgatg

SEQ ID NO: 9476 - RNA, 20 nt, Homo sapiens
  source 1..20: mol_type = genomic RNA
tatcaaattcaatctgatgt

SEQ ID NO: 9477 - RNA, 20 nt, Homo sapiens
  source 1..20: mol_type = genomic RNA
atcaaattcaatctgatgtc

SEQ ID NO: 9478 - RNA, 20 nt, Homo sapiens
  source 1..20: mol_type = genomic RNA
tcaaattcaatctgatgtca

SEQ ID NO: 9479 - RNA, 20 nt, Homo sapiens
  source 1..20: mol_type = genomic RNA
caaattcaatctgatgtcaa

SEQ ID NO: 9480 - RNA, 20 nt, Homo sapiens
  source 1..20: mol_type = genomic RNA
aaattcaatctgatgtcaaa

SEQ ID NO: 9481 - RNA, 20 nt, Homo sapiens
  source 1..20: mol_type = genomic RNA
aattcaatctgatgtcaaat

SEQ ID NO: 9482 - RNA, 20 nt, Homo sapiens
  source 1..20: mol_type = genomic RNA
attcaatctgatgtcaaata

SEQ ID NO: 9483 - RNA, 20 nt, Homo sapiens
  source 1..20: mol_type = genomic RNA
ttcaatctgatgtcaaatag

SEQ ID NO: 9484 - RNA, 20 nt, Homo sapiens
  source 1..20: mol_type = genomic RNA
tcaatctgatgtcaaatagc

SEQ ID NO: 9485 - RNA, 20 nt, Homo sapiens
  source 1..20: mol_type = genomic RNA
caatctgatgtcaaatagca

SEQ ID NO: 9486 - RNA, 20 nt, Homo sapiens
  source 1..20: mol_type = genomic RNA
aatctgatgtcaaatagcac

SEQ ID NO: 9487 - RNA, 20 nt, Homo sapiens
  source 1..20: mol_type = genomic RNA
atctgatgtcaaatagcact

SEQ ID NO: 9488 - RNA, 20 nt, Homo sapiens
  source 1..20: mol_type = genomic RNA
tctgatgtcaaatagcacta

SEQ ID NO: 9489 - RNA, 20 nt, Homo sapiens
  source 1..20: mol_type = genomic RNA
ctgatgtcaaatagcactaa

SEQ ID NO: 9490 - RNA, 20 nt, Homo sapiens
  source 1..20: mol_type = genomic RNA
tgatgtcaaatagcactaag

SEQ ID NO: 9491 - RNA, 20 nt, Homo sapiens
  source 1..20: mol_type = genomic RNA
gatgtcaaatagcactaaga

SEQ ID NO: 9492 - RNA, 20 nt, Homo sapiens
  source 1..20: mol_type = genomic RNA
atgtcaaatagcactaagaa

SEQ ID NO: 9493 - RNA, 20 nt, Homo sapiens
  source 1..20: mol_type = genomic RNA
tgtcaaatagcactaagaag

SEQ ID NO: 9494 - RNA, 20 nt, Homo sapiens
  source 1..20: mol_type = genomic RNA
gtcaaatagcactaagaagt

SEQ ID NO: 9495 - RNA, 20 nt, Homo sapiens
  source 1..20: mol_type = genomic RNA
tcaaatagcactaagaagtt

SEQ ID NO: 9496 - RNA, 20 nt, Homo sapiens
  source 1..20: mol_type = genomic RNA
caaatagcactaagaagtta

SEQ ID NO: 9497 - RNA, 20 nt, Homo sapiens
  source 1..20: mol_type = genomic RNA
aaatagcactaagaagttat

SEQ ID NO: 9498 - RNA, 20 nt, Homo sapiens
  source 1..20: mol_type = genomic RNA
aatagcactaagaagttatt

SEQ ID NO: 9499 - RNA, 20 nt, Homo sapiens
  source 1..20: mol_type = genomic RNA
atagcactaagaagttattg

SEQ ID NO: 9500 - RNA, 20 nt, Homo sapiens
  source 1..20: mol_type = genomic RNA
tagcactaagaagttattgt

SEQ ID NO: 9501 - RNA, 20 nt, Homo sapiens
  source 1..20: mol_type = genomic RNA
agcactaagaagttattgtg

SEQ ID NO: 9502 - RNA, 20 nt, Homo sapiens
  source 1..20: mol_type = genomic RNA
gcactaagaagttattgtgc

SEQ ID NO: 9503 - RNA, 20 nt, Homo sapiens
  source 1..20: mol_type = genomic RNA
cactaagaagttattgtgcc

SEQ ID NO: 9504 - RNA, 20 nt, Homo sapiens
  source 1..20: mol_type = genomic RNA
actaagaagttattgtgcct

SEQ ID NO: 9505 - RNA, 20 nt, Homo sapiens
  source 1..20: mol_type = genomic RNA
ctaagaagttattgtgcctt

SEQ ID NO: 9506 - RNA, 20 nt, Homo sapiens
  source 1..20: mol_type = genomic RNA
taagaagttattgtgcctta

SEQ ID NO: 9507 - RNA, 20 nt, Homo sapiens
  source 1..20: mol_type = genomic RNA
aagaagttattgtgccttat

SEQ ID NO: 9508 - RNA, 20 nt, Homo sapiens
  source 1..20: mol_type = genomic RNA
agaagttattgtgccttatg

SEQ ID NO: 9509 - RNA, 20 nt, Homo sapiens
  source 1..20: mol_type = genomic RNA
gaagttattgtgccttatga

SEQ ID NO: 9510 - RNA, 20 nt, Homo sapiens
  source 1..20: mol_type = genomic RNA
aagttattgtgccttatgaa

SEQ ID NO: 9511 - RNA, 20 nt, Homo sapiens
  source 1..20: mol_type = genomic RNA
agttattgtgccttatgaaa

SEQ ID NO: 9512 - RNA, 20 nt, Homo sapiens
  source 1..20: mol_type = genomic RNA
gttattgtgccttatgaaaa

SEQ ID NO: 9513 - RNA, 20 nt, Homo sapiens
  source 1..20: mol_type = genomic RNA
ttattgtgccttatgaaaaa

SEQ ID NO: 9514 - RNA, 20 nt, Homo sapiens
  source 1..20: mol_type = genomic RNA
tattgtgccttatgaaaaat

SEQ ID NO: 9515 - RNA, 20 nt, Homo sapiens
  source 1..20: mol_type = genomic RNA
attgtgccttatgaaaaata

SEQ ID NO: 9516 - RNA, 20 nt, Homo sapiens
  source 1..20: mol_type = genomic RNA
ttgtgccttatgaaaaataa

SEQ ID NO: 9517 - RNA, 20 nt, Homo sapiens
  source 1..20: mol_type = genomic RNA
tgtgccttatgaaaaataat

SEQ ID NO: 9518 - RNA, 20 nt, Homo sapiens
  source 1..20: mol_type = genomic RNA
gtgccttatgaaaaataatg

SEQ ID NO: 9519 - RNA, 20 nt, Homo sapiens
  source 1..20: mol_type = genomic RNA
tgccttatgaaaaataatga

SEQ ID NO: 9520 - RNA, 20 nt, Homo sapiens
  source 1..20: mol_type = genomic RNA
gccttatgaaaaataatgat

SEQ ID NO: 9521 - RNA, 20 nt, Homo sapiens
  source 1..20: mol_type = genomic RNA
ccttatgaaaaataatgatc

SEQ ID NO: 9522 - RNA, 20 nt, Homo sapiens
  source 1..20: mol_type = genomic RNA
cttatgaaaaataatgatct

SEQ ID NO: 9523 - RNA, 20 nt, Homo sapiens
  source 1..20: mol_type = genomic RNA
ttatgaaaaataatgatctc

SEQ ID NO: 9524 - RNA, 20 nt, Homo sapiens
  source 1..20: mol_type = genomic RNA
tatgaaaaataatgatctct

SEQ ID NO: 9525 - RNA, 20 nt, Homo sapiens
  source 1..20: mol_type = genomic RNA
atgaaaaataatgatctctg

SEQ ID NO: 9526 - RNA, 20 nt, Homo sapiens
  source 1..20: mol_type = genomic RNA
tgaaaaataatgatctctgt

SEQ ID NO: 9527 - RNA, 20 nt, Homo sapiens
  source 1..20: mol_type = genomic RNA
gaaaaataatgatctctgtc

SEQ ID NO: 9528 - RNA, 20 nt, Homo sapiens
  source 1..20: mol_type = genomic RNA
aaaaataatgatctctgtct

SEQ ID NO: 9529 - RNA, 20 nt, Homo sapiens
  source 1..20: mol_type = genomic RNA
aaaataatgatctctgtcta

SEQ ID NO: 9530 - RNA, 20 nt, Homo sapiens
  source 1..20: mol_type = genomic RNA
aaataatgatctctgtctag

SEQ ID NO: 9531 - RNA, 20 nt, Homo sapiens
  source 1..20: mol_type = genomic RNA
aataatgatctctgtctaga

SEQ ID NO: 9532 - RNA, 20 nt, Homo sapiens
  source 1..20: mol_type = genomic RNA
ataatgatctctgtctagaa

SEQ ID NO: 9533 - RNA, 20 nt, Homo sapiens
  source 1..20: mol_type = genomic RNA
taatgatctctgtctagaaa

SEQ ID NO: 9534 - RNA, 20 nt, Homo sapiens
  source 1..20: mol_type = genomic RNA
aatgatctctgtctagaaat

SEQ ID NO: 9535 - RNA, 20 nt, Homo sapiens
  source 1..20: mol_type = genomic RNA
atgatctctgtctagaaata

SEQ ID NO: 9536 - RNA, 20 nt, Homo sapiens
  source 1..20: mol_type = genomic RNA
tgatctctgtctagaaatac

SEQ ID NO: 9537 - RNA, 20 nt, Homo sapiens
  source 1..20: mol_type = genomic RNA
gatctctgtctagaaatacc

SEQ ID NO: 9538 - RNA, 20 nt, Homo sapiens
  source 1..20: mol_type = genomic RNA
atctctgtctagaaatacca

SEQ ID NO: 9539 - RNA, 20 nt, Homo sapiens
  source 1..20: mol_type = genomic RNA
tctctgtctagaaataccat

SEQ ID NO: 9540 - RNA, 20 nt, Homo sapiens
  source 1..20: mol_type = genomic RNA
ctctgtctagaaataccata

SEQ ID NO: 9541 - RNA, 20 nt, Homo sapiens
  source 1..20: mol_type = genomic RNA
tctgtctagaaataccatag

SEQ ID NO: 9542 - RNA, 20 nt, Homo sapiens
  source 1..20: mol_type = genomic RNA
ctgtctagaaataccataga

SEQ ID NO: 9543 - RNA, 20 nt, Homo sapiens
  source 1..20: mol_type = genomic RNA
tgtctagaaataccatagac

SEQ ID NO: 9544 - RNA, 20 nt, Homo sapiens
  source 1..20: mol_type = genomic RNA
gtctagaaataccatagacc

SEQ ID NO: 9545 - RNA, 20 nt, Homo sapiens
  source 1..20: mol_type = genomic RNA
tctagaaataccatagacca

SEQ ID NO: 9546 - RNA, 20 nt, Homo sapiens
  source 1..20: mol_type = genomic RNA
ctagaaataccatagaccat

SEQ ID NO: 9547 - RNA, 20 nt, Homo sapiens
  source 1..20: mol_type = genomic RNA
tagaaataccatagaccata

SEQ ID NO: 9548 - RNA, 20 nt, Homo sapiens
  source 1..20: mol_type = genomic RNA
agaaataccatagaccatat

SEQ ID NO: 9549 - RNA, 20 nt, Homo sapiens
  source 1..20: mol_type = genomic RNA
gaaataccatagaccatata

SEQ ID NO: 9550 - RNA, 20 nt, Homo sapiens
  source 1..20: mol_type = genomic RNA
aaataccatagaccatatat

SEQ ID NO: 9551 - RNA, 20 nt, Homo sapiens
  source 1..20: mol_type = genomic RNA
aataccatagaccatatata

SEQ ID NO: 9552 - RNA, 20 nt, Homo sapiens
  source 1..20: mol_type = genomic RNA
ataccatagaccatatatag

SEQ ID NO: 9553 - RNA, 20 nt, Homo sapiens
  source 1..20: mol_type = genomic RNA
taccatagaccatatatagt

SEQ ID NO: 9554 - RNA, 20 nt, Homo sapiens
  source 1..20: mol_type = genomic RNA
accatagaccatatatagtc

SEQ ID NO: 9555 - RNA, 20 nt, Homo sapiens
  source 1..20: mol_type = genomic RNA
ccatagaccatatatagtct

SEQ ID NO: 9556 - RNA, 20 nt, Homo sapiens
  source 1..20: mol_type = genomic RNA
catagaccatatatagtctc

SEQ ID NO: 9557 - RNA, 20 nt, Homo sapiens
  source 1..20: mol_type = genomic RNA
atagaccatatatagtctca

SEQ ID NO: 9558 - RNA, 20 nt, Homo sapiens
  source 1..20: mol_type = genomic RNA
tagaccatatatagtctcac

SEQ ID NO: 9559 - RNA, 20 nt, Homo sapiens
  source 1..20: mol_type = genomic RNA
agaccatatatagtctcaca

SEQ ID NO: 9560 - RNA, 20 nt, Homo sapiens
  source 1..20: mol_type = genomic RNA
gaccatatatagtctcacat

SEQ ID NO: 9561 - RNA, 20 nt, Homo sapiens
  source 1..20: mol_type = genomic RNA
accatatatagtctcacatt

SEQ ID NO: 9562 - RNA, 20 nt, Homo sapiens
  source 1..20: mol_type = genomic RNA
ccatatatagtctcacattg

SEQ ID NO: 9563 - RNA, 20 nt, Homo sapiens
  source 1..20: mol_type = genomic RNA
catatatagtctcacattga

SEQ ID NO: 9564 - RNA, 20 nt, Homo sapiens
  source 1..20: mol_type = genomic RNA
atatatagtctcacattgat

SEQ ID NO: 9565 - RNA, 20 nt, Homo sapiens
  source 1..20: mol_type = genomic RNA
tatatagtctcacattgata

SEQ ID NO: 9566 - RNA, 20 nt, Homo sapiens
  source 1..20: mol_type = genomic RNA
atatagtctcacattgataa

SEQ ID NO: 9567 - RNA, 20 nt, Homo sapiens
  source 1..20: mol_type = genomic RNA
tatagtctcacattgataat

SEQ ID NO: 9568 - RNA, 20 nt, Homo sapiens
  source 1..20: mol_type = genomic RNA
atagtctcacattgataatt

SEQ ID NO: 9569 - RNA, 20 nt, Homo sapiens
  source 1..20: mol_type = genomic RNA
tagtctcacattgataattg

SEQ ID NO: 9570 - RNA, 20 nt, Homo sapiens
  source 1..20: mol_type = genomic RNA
agtctcacattgataattga

SEQ ID NO: 9571 - RNA, 20 nt, Homo sapiens
  source 1..20: mol_type = genomic RNA
gtctcacattgataattgaa

SEQ ID NO: 9572 - RNA, 20 nt, Homo sapiens
  source 1..20: mol_type = genomic RNA
tctcacattgataattgaaa

SEQ ID NO: 9573 - RNA, 20 nt, Homo sapiens
  source 1..20: mol_type = genomic RNA
ctcacattgataattgaaac

SEQ ID NO: 9574 - RNA, 20 nt, Homo sapiens
  source 1..20: mol_type = genomic RNA
tcacattgataattgaaact

SEQ ID NO: 9575 - RNA, 20 nt, Homo sapiens
  source 1..20: mol_type = genomic RNA
cacattgataattgaaacta

SEQ ID NO: 9576 - RNA, 20 nt, Homo sapiens
  source 1..20: mol_type = genomic RNA
acattgataattgaaactag

SEQ ID NO: 9577 - RNA, 20 nt, Homo sapiens
  source 1..20: mol_type = genomic RNA
cattgataattgaaactaga

SEQ ID NO: 9578 - RNA, 20 nt, Homo sapiens
  source 1..20: mol_type = genomic RNA
attgataattgaaactagaa

SEQ ID NO: 9579 - RNA, 20 nt, Homo sapiens
  source 1..20: mol_type = genomic RNA
ttgataattgaaactagaag

SEQ ID NO: 9580 - RNA, 20 nt, Homo sapiens
  source 1..20: mol_type = genomic RNA
tgataattgaaactagaagg

SEQ ID NO: 9581 - RNA, 20 nt, Homo sapiens
  source 1..20: mol_type = genomic RNA
gataattgaaactagaaggg

SEQ ID NO: 9582 - RNA, 20 nt, Homo sapiens
  source 1..20: mol_type = genomic RNA
ataattgaaactagaagggt

SEQ ID NO: 9583 - RNA, 20 nt, Homo sapiens
  source 1..20: mol_type = genomic RNA
taattgaaactagaagggtc

SEQ ID NO: 9584 - RNA, 20 nt, Homo sapiens
  source 1..20: mol_type = genomic RNA
aattgaaactagaagggtct

SEQ ID NO: 9585 - RNA, 20 nt, Homo sapiens
  source 1..20: mol_type = genomic RNA
attgaaactagaagggtcta

SEQ ID NO: 9586 - RNA, 20 nt, Homo sapiens
  source 1..20: mol_type = genomic RNA
ttgaaactagaagggtctat

SEQ ID NO: 9587 - RNA, 20 nt, Homo sapiens
  source 1..20: mol_type = genomic RNA
tgaaactagaagggtctata

SEQ ID NO: 9588 - RNA, 20 nt, Homo sapiens
  source 1..20: mol_type = genomic RNA
gaaactagaagggtctataa

SEQ ID NO: 9589 - RNA, 20 nt, Homo sapiens
  source 1..20: mol_type = genomic RNA
aaactagaagggtctataat

SEQ ID NO: 9590 - RNA, 20 nt, Homo sapiens
  source 1..20: mol_type = genomic RNA
aactagaagggtctataatc

SEQ ID NO: 9591 - RNA, 20 nt, Homo sapiens
  source 1..20: mol_type = genomic RNA
actagaagggtctataatca

SEQ ID NO: 9592 - RNA, 20 nt, Homo sapiens
  source 1..20: mol_type = genomic RNA
ctagaagggtctataatcag

SEQ ID NO: 9593 - RNA, 20 nt, Homo sapiens
  source 1..20: mol_type = genomic RNA
tagaagggtctataatcagc

SEQ ID NO: 9594 - RNA, 20 nt, Homo sapiens
  source 1..20: mol_type = genomic RNA
agaagggtctataatcagcc

SEQ ID NO: 9595 - RNA, 20 nt, Homo sapiens
  source 1..20: mol_type = genomic RNA
gaagggtctataatcagcct

SEQ ID NO: 9596 - RNA, 20 nt, Homo sapiens
  source 1..20: mol_type = genomic RNA
aagggtctataatcagccta

SEQ ID NO: 9597 - RNA, 20 nt, Homo sapiens
  source 1..20: mol_type = genomic RNA
agggtctataatcagcctat

SEQ ID NO: 9598 - RNA, 20 nt, Homo sapiens
  source 1..20: mol_type = genomic RNA
gggtctataatcagcctatg

SEQ ID NO: 9599 - RNA, 20 nt, Homo sapiens
  source 1..20: mol_type = genomic RNA
ggtctataatcagcctatgc

SEQ ID NO: 9600 - RNA, 20 nt, Homo sapiens
  source 1..20: mol_type = genomic RNA
gtctataatcagcctatgcc

SEQ ID NO: 9601 - RNA, 20 nt, Homo sapiens
  source 1..20: mol_type = genomic RNA
tctataatcagcctatgcca

SEQ ID NO: 9602 - RNA, 20 nt, Homo sapiens
  source 1..20: mol_type = genomic RNA
ctataatcagcctatgccag

SEQ ID NO: 9603 - RNA, 20 nt, Homo sapiens
  source 1..20: mol_type = genomic RNA
tataatcagcctatgccagg

SEQ ID NO: 9604 - RNA, 20 nt, Homo sapiens
  source 1..20: mol_type = genomic RNA
ataatcagcctatgccaggg

SEQ ID NO: 9605 - RNA, 20 nt, Homo sapiens
  source 1..20: mol_type = genomic RNA
taatcagcctatgccagggc

SEQ ID NO: 9606 - RNA, 20 nt, Homo sapiens
  source 1..20: mol_type = genomic RNA
aatcagcctatgccagggct

SEQ ID NO: 9607 - RNA, 20 nt, Homo sapiens
  source 1..20: mol_type = genomic RNA
atcagcctatgccagggctt

SEQ ID NO: 9608 - RNA, 20 nt, Homo sapiens
  source 1..20: mol_type = genomic RNA
tcagcctatgccagggcttc

SEQ ID NO: 9609 - RNA, 20 nt, Homo sapiens
  source 1..20: mol_type = genomic RNA
cagcctatgccagggcttca

SEQ ID NO: 9610 - RNA, 20 nt, Homo sapiens
  source 1..20: mol_type = genomic RNA
agcctatgccagggcttcaa

SEQ ID NO: 9611 - RNA, 20 nt, Homo sapiens
  source 1..20: mol_type = genomic RNA
gcctatgccagggcttcaat

SEQ ID NO: 9612 - RNA, 20 nt, Homo sapiens
  source 1..20: mol_type = genomic RNA
cctatgccagggcttcaatg

SEQ ID NO: 9613 - RNA, 20 nt, Homo sapiens
  source 1..20: mol_type = genomic RNA
ctatgccagggcttcaatgg

SEQ ID NO: 9614 - RNA, 20 nt, Homo sapiens
  source 1..20: mol_type = genomic RNA
tatgccagggcttcaatgga

SEQ ID NO: 9615 - RNA, 20 nt, Homo sapiens
  source 1..20: mol_type = genomic RNA
atgccagggcttcaatggaa

SEQ ID NO: 9616 - RNA, 20 nt, Homo sapiens
  source 1..20: mol_type = genomic RNA
tgccagggcttcaatggaat

SEQ ID NO: 9617 - RNA, 20 nt, Homo sapiens
  source 1..20: mol_type = genomic RNA
gccagggcttcaatggaata

SEQ ID NO: 9618 - RNA, 20 nt, Homo sapiens
  source 1..20: mol_type = genomic RNA
ccagggcttcaatggaatag

SEQ ID NO: 9619 - RNA, 20 nt, Homo sapiens
  source 1..20: mol_type = genomic RNA
cagggcttcaatggaatagt

SEQ ID NO: 9620 - RNA, 20 nt, Homo sapiens
  source 1..20: mol_type = genomic RNA
agggcttcaatggaatagta

SEQ ID NO: 9621 - RNA, 20 nt, Homo sapiens
  source 1..20: mol_type = genomic RNA
gggcttcaatggaatagtat

SEQ ID NO: 9622 - RNA, 20 nt, Homo sapiens
  source 1..20: mol_type = genomic RNA
ggcttcaatggaatagtatc

SEQ ID NO: 9623 - RNA, 20 nt, Homo sapiens
  source 1..20: mol_type = genomic RNA
gcttcaatggaatagtatcc

SEQ ID NO: 9624 - RNA, 20 nt, Homo sapiens
  source 1..20: mol_type = genomic RNA
cttcaatggaatagtatccc

SEQ ID NO: 9625 - RNA, 20 nt, Homo sapiens
  source 1..20: mol_type = genomic RNA
ttcaatggaatagtatcccc

SEQ ID NO: 9626 - RNA, 20 nt, Homo sapiens
  source 1..20: mol_type = genomic RNA
tcaatggaatagtatcccct

SEQ ID NO: 9627 - RNA, 20 nt, Homo sapiens
  source 1..20: mol_type = genomic RNA
caatggaatagtatcccctt

SEQ ID NO: 9628 - RNA, 20 nt, Homo sapiens
  source 1..20: mol_type = genomic RNA
aatggaatagtatcccctta

SEQ ID NO: 9629 - RNA, 20 nt, Homo sapiens
  source 1..20: mol_type = genomic RNA
atggaatagtatccccttat

SEQ ID NO: 9630 - RNA, 20 nt, Homo sapiens
  source 1..20: mol_type = genomic RNA
tggaatagtatccccttatg

SEQ ID NO: 9631 - RNA, 20 nt, Homo sapiens
  source 1..20: mol_type = genomic RNA
ggaatagtatccccttatgt

SEQ ID NO: 9632 - RNA, 20 nt, Homo sapiens
  source 1..20: mol_type = genomic RNA
gaatagtatccccttatgtt

SEQ ID NO: 9633 - RNA, 20 nt, Homo sapiens
  source 1..20: mol_type = genomic RNA
aatagtatccccttatgttt

SEQ ID NO: 9634 - RNA, 20 nt, Homo sapiens
  source 1..20: mol_type = genomic RNA
atagtatccccttatgttta

SEQ ID NO: 9635 - RNA, 20 nt, Homo sapiens
  source 1..20: mol_type = genomic RNA
tagtatccccttatgtttag

SEQ ID NO: 9636 - RNA, 20 nt, Homo sapiens
  source 1..20: mol_type = genomic RNA
agtatccccttatgtttagt

SEQ ID NO: 9637 - RNA, 20 nt, Homo sapiens
  source 1..20: mol_type = genomic RNA
gtatccccttatgtttagtt

SEQ ID NO: 9638 - RNA, 20 nt, Homo sapiens
  source 1..20: mol_type = genomic RNA
tatccccttatgtttagttg

SEQ ID NO: 9639 - RNA, 20 nt, Homo sapiens
  source 1..20: mol_type = genomic RNA
atccccttatgtttagttga

SEQ ID NO: 9640 - RNA, 20 nt, Homo sapiens
  source 1..20: mol_type = genomic RNA
tccccttatgtttagttgaa

SEQ ID NO: 9641 - RNA, 20 nt, Homo sapiens
  source 1..20: mol_type = genomic RNA
ccccttatgtttagttgaaa

SEQ ID NO: 9642 - RNA, 20 nt, Homo sapiens
  source 1..20: mol_type = genomic RNA
cccttatgtttagttgaaat

SEQ ID NO: 9643 - RNA, 20 nt, Homo sapiens
  source 1..20: mol_type = genomic RNA
ccttatgtttagttgaaatg

SEQ ID NO: 9644 - RNA, 20 nt, Homo sapiens
  source 1..20: mol_type = genomic RNA
cttatgtttagttgaaatgt

SEQ ID NO: 9645 - RNA, 20 nt, Homo sapiens
  source 1..20: mol_type = genomic RNA
ttatgtttagttgaaatgtc

SEQ ID NO: 9646 - RNA, 20 nt, Homo sapiens
  source 1..20: mol_type = genomic RNA
tatgtttagttgaaatgtcc

SEQ ID NO: 9647 - RNA, 20 nt, Homo sapiens
  source 1..20: mol_type = genomic RNA
atgtttagttgaaatgtccc

SEQ ID NO: 9648 - RNA, 20 nt, Homo sapiens
  source 1..20: mol_type = genomic RNA
tgtttagttgaaatgtcccc

SEQ ID NO: 9649 - RNA, 20 nt, Homo sapiens
  source 1..20: mol_type = genomic RNA
gtttagttgaaatgtcccct

SEQ ID NO: 9650 - RNA, 20 nt, Homo sapiens
  source 1..20: mol_type = genomic RNA
tttagttgaaatgtcccctt

SEQ ID NO: 9651 - RNA, 20 nt, Homo sapiens
  source 1..20: mol_type = genomic RNA
ttagttgaaatgtcccctta

SEQ ID NO: 9652 - RNA, 20 nt, Homo sapiens
  source 1..20: mol_type = genomic RNA
tagttgaaatgtccccttaa

SEQ ID NO: 9653 - RNA, 20 nt, Homo sapiens
  source 1..20: mol_type = genomic RNA
agttgaaatgtccccttaac

SEQ ID NO: 9654 - RNA, 20 nt, Homo sapiens
  source 1..20: mol_type = genomic RNA
gttgaaatgtccccttaact

SEQ ID NO: 9655 - RNA, 20 nt, Homo sapiens
  source 1..20: mol_type = genomic RNA
ttgaaatgtccccttaactt

SEQ ID NO: 9656 - RNA, 20 nt, Homo sapiens
  source 1..20: mol_type = genomic RNA
tgaaatgtccccttaacttg

SEQ ID NO: 9657 - RNA, 20 nt, Homo sapiens
  source 1..20: mol_type = genomic RNA
gaaatgtccccttaacttga

SEQ ID NO: 9658 - RNA, 20 nt, Homo sapiens
  source 1..20: mol_type = genomic RNA
aaatgtccccttaacttgat

SEQ ID NO: 9659 - RNA, 20 nt, Homo sapiens
  source 1..20: mol_type = genomic RNA
aatgtccccttaacttgata

SEQ ID NO: 9660 - RNA, 20 nt, Homo sapiens
  source 1..20: mol_type = genomic RNA
atgtccccttaacttgatat

SEQ ID NO: 9661 - RNA, 20 nt, Homo sapiens
  source 1..20: mol_type = genomic RNA
tgtccccttaacttgatata

SEQ ID NO: 9662 - RNA, 20 nt, Homo sapiens
  source 1..20: mol_type = genomic RNA
gtccccttaacttgatataa

SEQ ID NO: 9663 - RNA, 20 nt, Homo sapiens
  source 1..20: mol_type = genomic RNA
tccccttaacttgatataat

SEQ ID NO: 9664 - RNA, 20 nt, Homo sapiens
  source 1..20: mol_type = genomic RNA
ccccttaacttgatataatg

SEQ ID NO: 9665 - RNA, 20 nt, Homo sapiens
  source 1..20: mol_type = genomic RNA
cccttaacttgatataatgt

SEQ ID NO: 9666 - RNA, 20 nt, Homo sapiens
  source 1..20: mol_type = genomic RNA
ccttaacttgatataatgtg

SEQ ID NO: 9667 - RNA, 20 nt, Homo sapiens
  source 1..20: mol_type = genomic RNA
cttaacttgatataatgtgt

SEQ ID NO: 9668 - RNA, 20 nt, Homo sapiens
  source 1..20: mol_type = genomic RNA
ttaacttgatataatgtgtt

SEQ ID NO: 9669 - RNA, 20 nt, Homo sapiens
  source 1..20: mol_type = genomic RNA
taacttgatataatgtgtta

SEQ ID NO: 9670 - RNA, 20 nt, Homo sapiens
  source 1..20: mol_type = genomic RNA
aacttgatataatgtgttat

SEQ ID NO: 9671 - RNA, 20 nt, Homo sapiens
  source 1..20: mol_type = genomic RNA
acttgatataatgtgttatg

SEQ ID NO: 9672 - RNA, 20 nt, Homo sapiens
  source 1..20: mol_type = genomic RNA
cttgatataatgtgttatgc

SEQ ID NO: 9673 - RNA, 20 nt, Homo sapiens
  source 1..20: mol_type = genomic RNA
ttgatataatgtgttatgct

SEQ ID NO: 9674 - RNA, 20 nt, Homo sapiens
  source 1..20: mol_type = genomic RNA
tgatataatgtgttatgctt

SEQ ID NO: 9675 - RNA, 20 nt, Homo sapiens
  source 1..20: mol_type = genomic RNA
gatataatgtgttatgctta

SEQ ID NO: 9676 - RNA, 20 nt, Homo sapiens
  source 1..20: mol_type = genomic RNA
atataatgtgttatgcttat

SEQ ID NO: 9677 - RNA, 20 nt, Homo sapiens
  source 1..20: mol_type = genomic RNA
tataatgtgttatgcttatg

SEQ ID NO: 9678 - RNA, 20 nt, Homo sapiens
  source 1..20: mol_type = genomic RNA
ataatgtgttatgcttatgg

SEQ ID NO: 9679 - RNA, 20 nt, Homo sapiens
  source 1..20: mol_type = genomic RNA
taatgtgttatgcttatggc

SEQ ID NO: 9680 - RNA, 20 nt, Homo sapiens
  source 1..20: mol_type = genomic RNA
aatgtgttatgcttatggcg

SEQ ID NO: 9681 - RNA, 20 nt, Homo sapiens
  source 1..20: mol_type = genomic RNA
atgtgttatgcttatggcgc

SEQ ID NO: 9682 - RNA, 20 nt, Homo sapiens
  source 1..20: mol_type = genomic RNA
tgtgttatgcttatggcgct

SEQ ID NO: 9683 - RNA, 20 nt, Homo sapiens
  source 1..20: mol_type = genomic RNA
gtgttatgcttatggcgctg

SEQ ID NO: 9684 - RNA, 20 nt, Homo sapiens
  source 1..20: mol_type = genomic RNA
tgttatgcttatggcgctgt

SEQ ID NO: 9685 - RNA, 20 nt, Homo sapiens
  source 1..20: mol_type = genomic RNA
gttatgcttatggcgctgtg

SEQ ID NO: 9686 - RNA, 20 nt, Homo sapiens
  source 1..20: mol_type = genomic RNA
ttatgcttatggcgctgtgg

SEQ ID NO: 9687 - RNA, 20 nt, Homo sapiens
  source 1..20: mol_type = genomic RNA
tatgcttatggcgctgtgga

SEQ ID NO: 9688 - RNA, 20 nt, Homo sapiens
  source 1..20: mol_type = genomic RNA
atgcttatggcgctgtggac

SEQ ID NO: 9689 - RNA, 20 nt, Homo sapiens
  source 1..20: mol_type = genomic RNA
tgcttatggcgctgtggaca

SEQ ID NO: 9690 - RNA, 20 nt, Homo sapiens
  source 1..20: mol_type = genomic RNA
gcttatggcgctgtggacaa

SEQ ID NO: 9691 - RNA, 20 nt, Homo sapiens
  source 1..20: mol_type = genomic RNA
cttatggcgctgtggacaat

SEQ ID NO: 9692 - RNA, 20 nt, Homo sapiens
  source 1..20: mol_type = genomic RNA
ttatggcgctgtggacaatc

SEQ ID NO: 9693 - RNA, 20 nt, Homo sapiens
  source 1..20: mol_type = genomic RNA
tatggcgctgtggacaatct

SEQ ID NO: 9694 - RNA, 20 nt, Homo sapiens
  source 1..20: mol_type = genomic RNA
atggcgctgtggacaatctg

SEQ ID NO: 9695 - RNA, 20 nt, Homo sapiens
  source 1..20: mol_type = genomic RNA
tggcgctgtggacaatctga

SEQ ID NO: 9696 - RNA, 20 nt, Homo sapiens
  source 1..20: mol_type = genomic RNA
ggcgctgtggacaatctgat

SEQ ID NO: 9697 - RNA, 20 nt, Homo sapiens
  source 1..20: mol_type = genomic RNA
gcgctgtggacaatctgatt

SEQ ID NO: 9698 - RNA, 20 nt, Homo sapiens
  source 1..20: mol_type = genomic RNA
cgctgtggacaatctgattt

SEQ ID NO: 9699 - RNA, 20 nt, Homo sapiens
  source 1..20: mol_type = genomic RNA
gctgtggacaatctgatttt

SEQ ID NO: 9700 - RNA, 20 nt, Homo sapiens
  source 1..20: mol_type = genomic RNA
ctgtggacaatctgattttt

SEQ ID NO: 9701 - RNA, 20 nt, Homo sapiens
  source 1..20: mol_type = genomic RNA
tgtggacaatctgatttttc

SEQ ID NO: 9702 - RNA, 20 nt, Homo sapiens
  source 1..20: mol_type = genomic RNA
gtggacaatctgatttttca

SEQ ID NO: 9703 - RNA, 20 nt, Homo sapiens
  source 1..20: mol_type = genomic RNA
tggacaatctgatttttcat

SEQ ID NO: 9704 - RNA, 20 nt, Homo sapiens
  source 1..20: mol_type = genomic RNA
ggacaatctgatttttcatg

SEQ ID NO: 9705 - RNA, 20 nt, Homo sapiens
  source 1..20: mol_type = genomic RNA
gacaatctgatttttcatgt

SEQ ID NO: 9706 - RNA, 20 nt, Homo sapiens
  source 1..20: mol_type = genomic RNA
acaatctgatttttcatgtc

SEQ ID NO: 9707 - RNA, 20 nt, Homo sapiens
  source 1..20: mol_type = genomic RNA
caatctgatttttcatgtca

SEQ ID NO: 9708 - RNA, 20 nt, Homo sapiens
  source 1..20: mol_type = genomic RNA
aatctgatttttcatgtcaa

SEQ ID NO: 9709 - RNA, 20 nt, Homo sapiens
  source 1..20: mol_type = genomic RNA
atctgatttttcatgtcaac

SEQ ID NO: 9710 - RNA, 20 nt, Homo sapiens
  source 1..20: mol_type = genomic RNA
tctgatttttcatgtcaact

SEQ ID NO: 9711 - RNA, 20 nt, Homo sapiens
  source 1..20: mol_type = genomic RNA
ctgatttttcatgtcaactt

SEQ ID NO: 9712 - RNA, 20 nt, Homo sapiens
  source 1..20: mol_type = genomic RNA
tgatttttcatgtcaacttt

SEQ ID NO: 9713 - RNA, 20 nt, Homo sapiens
  source 1..20: mol_type = genomic RNA
gatttttcatgtcaactttc

SEQ ID NO: 9714 - RNA, 20 nt, Homo sapiens
  source 1..20: mol_type = genomic RNA
atttttcatgtcaactttcc

SEQ ID NO: 9715 - RNA, 20 nt, Homo sapiens
  source 1..20: mol_type = genomic RNA
tttttcatgtcaactttcca

SEQ ID NO: 9716 - RNA, 20 nt, Homo sapiens
  source 1..20: mol_type = genomic RNA
ttttcatgtcaactttccag

SEQ ID NO: 9717 - RNA, 20 nt, Homo sapiens
  source 1..20: mol_type = genomic RNA
tttcatgtcaactttccaga

SEQ ID NO: 9718 - RNA, 20 nt, Homo sapiens
  source 1..20: mol_type = genomic RNA
ttcatgtcaactttccagat

SEQ ID NO: 9719 - RNA, 20 nt, Homo sapiens
  source 1..20: mol_type = genomic RNA
tcatgtcaactttccagatg

SEQ ID NO: 9720 - RNA, 20 nt, Homo sapiens
  source 1..20: mol_type = genomic RNA
catgtcaactttccagatga

SEQ ID NO: 9721 - RNA, 20 nt, Homo sapiens
  source 1..20: mol_type = genomic RNA
atgtcaactttccagatgat

SEQ ID NO: 9722 - RNA, 20 nt, Homo sapiens
  source 1..20: mol_type = genomic RNA
tgtcaactttccagatgatt

SEQ ID NO: 9723 - RNA, 20 nt, Homo sapiens
  source 1..20: mol_type = genomic RNA
gtcaactttccagatgattt

SEQ ID NO: 9724 - RNA, 20 nt, Homo sapiens
  source 1..20: mol_type = genomic RNA
tcaactttccagatgatttg

SEQ ID NO: 9725 - RNA, 20 nt, Homo sapiens
  source 1..20: mol_type = genomic RNA
caactttccagatgatttgt

SEQ ID NO: 9726 - RNA, 20 nt, Homo sapiens
  source 1..20: mol_type = genomic RNA
aactttccagatgatttgta

SEQ ID NO: 9727 - RNA, 20 nt, Homo sapiens
  source 1..20: mol_type = genomic RNA
actttccagatgatttgtaa

SEQ ID NO: 9728 - RNA, 20 nt, Homo sapiens
  source 1..20: mol_type = genomic RNA
ctttccagatgatttgtaac

SEQ ID NO: 9729 - RNA, 20 nt, Homo sapiens
  source 1..20: mol_type = genomic RNA
tttccagatgatttgtaact

SEQ ID NO: 9730 - RNA, 20 nt, Homo sapiens
  source 1..20: mol_type = genomic RNA
ttccagatgatttgtaactt

SEQ ID NO: 9731 - RNA, 20 nt, Homo sapiens
  source 1..20: mol_type = genomic RNA
tccagatgatttgtaacttc

SEQ ID NO: 9732 - RNA, 20 nt, Homo sapiens
  source 1..20: mol_type = genomic RNA
ccagatgatttgtaacttct

SEQ ID NO: 9733 - RNA, 20 nt, Homo sapiens
  source 1..20: mol_type = genomic RNA
cagatgatttgtaacttctc

SEQ ID NO: 9734 - RNA, 20 nt, Homo sapiens
  source 1..20: mol_type = genomic RNA
agatgatttgtaacttctct

SEQ ID NO: 9735 - RNA, 20 nt, Homo sapiens
  source 1..20: mol_type = genomic RNA
gatgatttgtaacttctctg

SEQ ID NO: 9736 - RNA, 20 nt, Homo sapiens
  source 1..20: mol_type = genomic RNA
atgatttgtaacttctctgt

SEQ ID NO: 9737 - RNA, 20 nt, Homo sapiens
  source 1..20: mol_type = genomic RNA
tgatttgtaacttctctgtg

SEQ ID NO: 9738 - RNA, 20 nt, Homo sapiens
  source 1..20: mol_type = genomic RNA
gatttgtaacttctctgtgc

SEQ ID NO: 9739 - RNA, 20 nt, Homo sapiens
  source 1..20: mol_type = genomic RNA
atttgtaacttctctgtgcc

SEQ ID NO: 9740 - RNA, 20 nt, Homo sapiens
  source 1..20: mol_type = genomic RNA
tttgtaacttctctgtgcca

SEQ ID NO: 9741 - RNA, 20 nt, Homo sapiens
  source 1..20: mol_type = genomic RNA
ttgtaacttctctgtgccaa

SEQ ID NO: 9742 - RNA, 20 nt, Homo sapiens
  source 1..20: mol_type = genomic RNA
tgtaacttctctgtgccaaa

SEQ ID NO: 9743 - RNA, 20 nt, Homo sapiens
  source 1..20: mol_type = genomic RNA
gtaacttctctgtgccaaac

SEQ ID NO: 9744 - RNA, 20 nt, Homo sapiens
  source 1..20: mol_type = genomic RNA
taacttctctgtgccaaacc

SEQ ID NO: 9745 - RNA, 20 nt, Homo sapiens
  source 1..20: mol_type = genomic RNA
aacttctctgtgccaaacct

SEQ ID NO: 9746 - RNA, 20 nt, Homo sapiens
  source 1..20: mol_type = genomic RNA
acttctctgtgccaaacctt

SEQ ID NO: 9747 - RNA, 20 nt, Homo sapiens
  source 1..20: mol_type = genomic RNA
cttctctgtgccaaaccttt

SEQ ID NO: 9748 - RNA, 20 nt, Homo sapiens
  source 1..20: mol_type = genomic RNA
ttctctgtgccaaacctttt

SEQ ID NO: 9749 - RNA, 20 nt, Homo sapiens
  source 1..20: mol_type = genomic RNA
tctctgtgccaaacctttta

SEQ ID NO: 9750 - RNA, 20 nt, Homo sapiens
  source 1..20: mol_type = genomic RNA
ctctgtgccaaaccttttat

SEQ ID NO: 9751 - RNA, 20 nt, Homo sapiens
  source 1..20: mol_type = genomic RNA
tctgtgccaaaccttttata

SEQ ID NO: 9752 - RNA, 20 nt, Homo sapiens
  source 1..20: mol_type = genomic RNA
ctgtgccaaaccttttataa

SEQ ID NO: 9753 - RNA, 20 nt, Homo sapiens
  source 1..20: mol_type = genomic RNA
tgtgccaaaccttttataaa

SEQ ID NO: 9754 - RNA, 20 nt, Homo sapiens
  source 1..20: mol_type = genomic RNA
gtgccaaaccttttataaac

SEQ ID NO: 9755 - RNA, 20 nt, Homo sapiens
  source 1..20: mol_type = genomic RNA
tgccaaaccttttataaaca

SEQ ID NO: 9756 - RNA, 20 nt, Homo sapiens
  source 1..20: mol_type = genomic RNA
gccaaaccttttataaacat

SEQ ID NO: 9757 - RNA, 20 nt, Homo sapiens
  source 1..20: mol_type = genomic RNA
ccaaaccttttataaacata

SEQ ID NO: 9758 - RNA, 20 nt, Homo sapiens
  source 1..20: mol_type = genomic RNA
caaaccttttataaacataa

SEQ ID NO: 9759 - RNA, 20 nt, Homo sapiens
  source 1..20: mol_type = genomic RNA
aaaccttttataaacataaa

SEQ ID NO: 9760 - RNA, 20 nt, Homo sapiens
  source 1..20: mol_type = genomic RNA
aaccttttataaacataaat

SEQ ID NO: 9761 - RNA, 20 nt, Homo sapiens
  source 1..20: mol_type = genomic RNA
accttttataaacataaatt

SEQ ID NO: 9762 - RNA, 20 nt, Homo sapiens
  source 1..20: mol_type = genomic RNA
ccttttataaacataaattt

SEQ ID NO: 9763 - RNA, 20 nt, Homo sapiens
  source 1..20: mol_type = genomic RNA
cttttataaacataaatttt

SEQ ID NO: 9764 - RNA, 20 nt, Homo sapiens
  source 1..20: mol_type = genomic RNA
ttttataaacataaattttt

SEQ ID NO: 9765 - RNA, 20 nt, Homo sapiens
  source 1..20: mol_type = genomic RNA
tttataaacataaatttttg

SEQ ID NO: 9766 - RNA, 20 nt, Homo sapiens
  source 1..20: mol_type = genomic RNA
ttataaacataaatttttga

SEQ ID NO: 9767 - RNA, 20 nt, Homo sapiens
  source 1..20: mol_type = genomic RNA
tataaacataaatttttgag

SEQ ID NO: 9768 - RNA, 20 nt, Homo sapiens
  source 1..20: mol_type = genomic RNA
ataaacataaatttttgaga

SEQ ID NO: 9769 - RNA, 20 nt, Homo sapiens
  source 1..20: mol_type = genomic RNA
taaacataaatttttgagat

SEQ ID NO: 9770 - RNA, 20 nt, Homo sapiens
  source 1..20: mol_type = genomic RNA
aaacataaatttttgagata

SEQ ID NO: 9771 - RNA, 20 nt, Homo sapiens
  source 1..20: mol_type = genomic RNA
aacataaatttttgagatat

SEQ ID NO: 9772 - RNA, 20 nt, Homo sapiens
  source 1..20: mol_type = genomic RNA
acataaatttttgagatatg

SEQ ID NO: 9773 - RNA, 20 nt, Homo sapiens
  source 1..20: mol_type = genomic RNA
cataaatttttgagatatgt

SEQ ID NO: 9774 - RNA, 20 nt, Homo sapiens
  source 1..20: mol_type = genomic RNA
ataaatttttgagatatgta

SEQ ID NO: 9775 - RNA, 20 nt, Homo sapiens
  source 1..20: mol_type = genomic RNA
taaatttttgagatatgtat

SEQ ID NO: 9776 - RNA, 20 nt, Homo sapiens
  source 1..20: mol_type = genomic RNA
aaatttttgagatatgtatt

SEQ ID NO: 9777 - RNA, 20 nt, Homo sapiens
  source 1..20: mol_type = genomic RNA
aatttttgagatatgtattt

SEQ ID NO: 9778 - RNA, 20 nt, Homo sapiens
  source 1..20: mol_type = genomic RNA
atttttgagatatgtatttt

SEQ ID NO: 9779 - RNA, 20 nt, Homo sapiens
  source 1..20: mol_type = genomic RNA
tttttgagatatgtatttta

SEQ ID NO: 9780 - RNA, 20 nt, Homo sapiens
  source 1..20: mol_type = genomic RNA
ttttgagatatgtattttaa

SEQ ID NO: 9781 - RNA, 20 nt, Homo sapiens
  source 1..20: mol_type = genomic RNA
tttgagatatgtattttaaa

SEQ ID NO: 9782 - RNA, 20 nt, Homo sapiens
  source 1..20: mol_type = genomic RNA
ttgagatatgtattttaaaa

SEQ ID NO: 9783 - RNA, 20 nt, Homo sapiens
  source 1..20: mol_type = genomic RNA
tgagatatgtattttaaaat

SEQ ID NO: 9784 - RNA, 20 nt, Homo sapiens
  source 1..20: mol_type = genomic RNA
gagatatgtattttaaaatt

SEQ ID NO: 9785 - RNA, 20 nt, Homo sapiens
  source 1..20: mol_type = genomic RNA
agatatgtattttaaaattg

SEQ ID NO: 9786 - RNA, 20 nt, Homo sapiens
  source 1..20: mol_type = genomic RNA
gatatgtattttaaaattgt

SEQ ID NO: 9787 - RNA, 20 nt, Homo sapiens
  source 1..20: mol_type = genomic RNA
atatgtattttaaaattgta

SEQ ID NO: 9788 - RNA, 20 nt, Homo sapiens
  source 1..20: mol_type = genomic RNA
tatgtattttaaaattgtag

SEQ ID NO: 9789 - RNA, 20 nt, Homo sapiens
  source 1..20: mol_type = genomic RNA
atgtattttaaaattgtagc

SEQ ID NO: 9790 - RNA, 20 nt, Homo sapiens
  source 1..20: mol_type = genomic RNA
tgtattttaaaattgtagca

SEQ ID NO: 9791 - RNA, 20 nt, Homo sapiens
  source 1..20: mol_type = genomic RNA
gtattttaaaattgtagcac

SEQ ID NO: 9792 - RNA, 20 nt, Homo sapiens
  source 1..20: mol_type = genomic RNA
tattttaaaattgtagcaca

SEQ ID NO: 9793 - RNA, 20 nt, Homo sapiens
  source 1..20: mol_type = genomic RNA
attttaaaattgtagcacat

SEQ ID NO: 9794 - RNA, 20 nt, Homo sapiens
  source 1..20: mol_type = genomic RNA
ttttaaaattgtagcacatg

SEQ ID NO: 9795 - RNA, 20 nt, Homo sapiens
  source 1..20: mol_type = genomic RNA
tttaaaattgtagcacatgt

SEQ ID NO: 9796 - RNA, 20 nt, Homo sapiens
  source 1..20: mol_type = genomic RNA
ttaaaattgtagcacatgtt

SEQ ID NO: 9797 - RNA, 20 nt, Homo sapiens
  source 1..20: mol_type = genomic RNA
taaaattgtagcacatgttt

SEQ ID NO: 9798 - RNA, 20 nt, Homo sapiens
  source 1..20: mol_type = genomic RNA
aaaattgtagcacatgtttc

SEQ ID NO: 9799 - RNA, 20 nt, Homo sapiens
  source 1..20: mol_type = genomic RNA
aaattgtagcacatgtttcc

SEQ ID NO: 9800 - RNA, 20 nt, Homo sapiens
  source 1..20: mol_type = genomic RNA
aattgtagcacatgtttccc

SEQ ID NO: 9801 - RNA, 20 nt, Homo sapiens
  source 1..20: mol_type = genomic RNA
attgtagcacatgtttccct

SEQ ID NO: 9802 - RNA, 20 nt, Homo sapiens
  source 1..20: mol_type = genomic RNA
ttgtagcacatgtttccctg

SEQ ID NO: 9803 - RNA, 20 nt, Homo sapiens
  source 1..20: mol_type = genomic RNA
tgtagcacatgtttccctga

SEQ ID NO: 9804 - RNA, 20 nt, Homo sapiens
  source 1..20: mol_type = genomic RNA
gtagcacatgtttccctgac

SEQ ID NO: 9805 - RNA, 20 nt, Homo sapiens
  source 1..20: mol_type = genomic RNA
tagcacatgtttccctgaca

SEQ ID NO: 9806 - RNA, 20 nt, Homo sapiens
  source 1..20: mol_type = genomic RNA
agcacatgtttccctgacat

SEQ ID NO: 9807 - RNA, 20 nt, Homo sapiens
  source 1..20: mol_type = genomic RNA
gcacatgtttccctgacatt

SEQ ID NO: 9808 - RNA, 20 nt, Homo sapiens
  source 1..20: mol_type = genomic RNA
cacatgtttccctgacattt

SEQ ID NO: 9809 - RNA, 20 nt, Homo sapiens
  source 1..20: mol_type = genomic RNA
acatgtttccctgacatttt

SEQ ID NO: 9810 - RNA, 20 nt, Homo sapiens
  source 1..20: mol_type = genomic RNA
catgtttccctgacattttc

SEQ ID NO: 9811 - RNA, 20 nt, Homo sapiens
  source 1..20: mol_type = genomic RNA
atgtttccctgacattttca

SEQ ID NO: 9812 - RNA, 20 nt, Homo sapiens
  source 1..20: mol_type = genomic RNA
tgtttccctgacattttcaa

SEQ ID NO: 9813 - RNA, 20 nt, Homo sapiens
  source 1..20: mol_type = genomic RNA
gtttccctgacattttcaat

SEQ ID NO: 9814 - RNA, 20 nt, Homo sapiens
  source 1..20: mol_type = genomic RNA
tttccctgacattttcaata

SEQ ID NO: 9815 - RNA, 20 nt, Homo sapiens
  source 1..20: mol_type = genomic RNA
ttccctgacattttcaatag

SEQ ID NO: 9816 - RNA, 20 nt, Homo sapiens
  source 1..20: mol_type = genomic RNA
tccctgacattttcaataga

SEQ ID NO: 9817 - RNA, 20 nt, Homo sapiens
  source 1..20: mol_type = genomic RNA
ccctgacattttcaatagag

SEQ ID NO: 9818 - RNA, 20 nt, Homo sapiens
  source 1..20: mol_type = genomic RNA
cctgacattttcaatagagg

SEQ ID NO: 9819 - RNA, 20 nt, Homo sapiens
  source 1..20: mol_type = genomic RNA
ctgacattttcaatagagga

SEQ ID NO: 9820 - RNA, 20 nt, Homo sapiens
  source 1..20: mol_type = genomic RNA
tgacattttcaatagaggat

SEQ ID NO: 9821 - RNA, 20 nt, Homo sapiens
  source 1..20: mol_type = genomic RNA
gacattttcaatagaggata

SEQ ID NO: 9822 - RNA, 20 nt, Homo sapiens
  source 1..20: mol_type = genomic RNA
acattttcaatagaggatac

SEQ ID NO: 9823 - RNA, 20 nt, Homo sapiens
  source 1..20: mol_type = genomic RNA
cattttcaatagaggataca

SEQ ID NO: 9824 - RNA, 20 nt, Homo sapiens
  source 1..20: mol_type = genomic RNA
attttcaatagaggatacaa

SEQ ID NO: 9825 - RNA, 20 nt, Homo sapiens
  source 1..20: mol_type = genomic RNA
ttttcaatagaggatacaac

SEQ ID NO: 9826 - RNA, 20 nt, Homo sapiens
  source 1..20: mol_type = genomic RNA
tttcaatagaggatacaaca

SEQ ID NO: 9827 - RNA, 20 nt, Homo sapiens
  source 1..20: mol_type = genomic RNA
ttcaatagaggatacaacat

SEQ ID NO: 9828 - RNA, 20 nt, Homo sapiens
  source 1..20: mol_type = genomic RNA
tcaatagaggatacaacatc

SEQ ID NO: 9829 - RNA, 20 nt, Homo sapiens
  source 1..20: mol_type = genomic RNA
caatagaggatacaacatca

SEQ ID NO: 9830 - RNA, 20 nt, Homo sapiens
  source 1..20: mol_type = genomic RNA
aatagaggatacaacatcac

SEQ ID NO: 9831 - RNA, 20 nt, Homo sapiens
  source 1..20: mol_type = genomic RNA
atagaggatacaacatcaca

SEQ ID NO: 9832 - RNA, 20 nt, Homo sapiens
  source 1..20: mol_type = genomic RNA
tagaggatacaacatcacag

SEQ ID NO: 9833 - RNA, 20 nt, Homo sapiens
  source 1..20: mol_type = genomic RNA
agaggatacaacatcacaga

SEQ ID NO: 9834 - RNA, 20 nt, Homo sapiens
  source 1..20: mol_type = genomic RNA
gaggatacaacatcacagaa

SEQ ID NO: 9835 - RNA, 20 nt, Homo sapiens
  source 1..20: mol_type = genomic RNA
aggatacaacatcacagaat

SEQ ID NO: 9836 - RNA, 20 nt, Homo sapiens
  source 1..20: mol_type = genomic RNA
ggatacaacatcacagaatc

SEQ ID NO: 9837 - RNA, 20 nt, Homo sapiens
  source 1..20: mol_type = genomic RNA
gatacaacatcacagaatct

SEQ ID NO: 9838 - RNA, 20 nt, Homo sapiens
  source 1..20: mol_type = genomic RNA
atacaacatcacagaatctt

SEQ ID NO: 9839 - RNA, 20 nt, Homo sapiens
  source 1..20: mol_type = genomic RNA
tacaacatcacagaatcttt

SEQ ID NO: 9840 - RNA, 20 nt, Homo sapiens
  source 1..20: mol_type = genomic RNA
acaacatcacagaatctttc

SEQ ID NO: 9841 - RNA, 20 nt, Homo sapiens
  source 1..20: mol_type = genomic RNA
caacatcacagaatctttct

SEQ ID NO: 9842 - RNA, 20 nt, Homo sapiens
  source 1..20: mol_type = genomic RNA
aacatcacagaatctttctg

SEQ ID NO: 9843 - RNA, 20 nt, Homo sapiens
  source 1..20: mol_type = genomic RNA
acatcacagaatctttctgg

SEQ ID NO: 9844 - RNA, 20 nt, Homo sapiens
  source 1..20: mol_type = genomic RNA
catcacagaatctttctgga

SEQ ID NO: 9845 - RNA, 20 nt, Homo sapiens
  source 1..20: mol_type = genomic RNA
atcacagaatctttctggat

SEQ ID NO: 9846 - RNA, 20 nt, Homo sapiens
  source 1..20: mol_type = genomic RNA
tcacagaatctttctggatg

SEQ ID NO: 9847 - RNA, 20 nt, Homo sapiens
  source 1..20: mol_type = genomic RNA
cacagaatctttctggatga

SEQ ID NO: 9848 - RNA, 20 nt, Homo sapiens
  source 1..20: mol_type = genomic RNA
acagaatctttctggatgat

SEQ ID NO: 9849 - RNA, 20 nt, Homo sapiens
  source 1..20: mol_type = genomic RNA
cagaatctttctggatgatt

SEQ ID NO: 9850 - RNA, 20 nt, Homo sapiens
  source 1..20: mol_type = genomic RNA
agaatctttctggatgattc

SEQ ID NO: 9851 - RNA, 20 nt, Homo sapiens
  source 1..20: mol_type = genomic RNA
gaatctttctggatgattct

SEQ ID NO: 9852 - RNA, 20 nt, Homo sapiens
  source 1..20: mol_type = genomic RNA
aatctttctggatgattctg

SEQ ID NO: 9853 - RNA, 20 nt, Homo sapiens
  source 1..20: mol_type = genomic RNA
atctttctggatgattctgt

SEQ ID NO: 9854 - RNA, 20 nt, Homo sapiens
  source 1..20: mol_type = genomic RNA
tctttctggatgattctgtg

SEQ ID NO: 9855 - RNA, 20 nt, Homo sapiens
  source 1..20: mol_type = genomic RNA
ctttctggatgattctgtgt

SEQ ID NO: 9856 - RNA, 20 nt, Homo sapiens
  source 1..20: mol_type = genomic RNA
tttctggatgattctgtgtt

SEQ ID NO: 9857 - RNA, 20 nt, Homo sapiens
  source 1..20: mol_type = genomic RNA
ttctggatgattctgtgtta

SEQ ID NO: 9858 - RNA, 20 nt, Homo sapiens
  source 1..20: mol_type = genomic RNA
tctggatgattctgtgttat

SEQ ID NO: 9859 - RNA, 20 nt, Homo sapiens
  source 1..20: mol_type = genomic RNA
ctggatgattctgtgttatc

SEQ ID NO: 9860 - RNA, 20 nt, Homo sapiens
  source 1..20: mol_type = genomic RNA
tggatgattctgtgttatca

SEQ ID NO: 9861 - RNA, 20 nt, Homo sapiens
  source 1..20: mol_type = genomic RNA
ggatgattctgtgttatcaa

SEQ ID NO: 9862 - RNA, 20 nt, Homo sapiens
  source 1..20: mol_type = genomic RNA
gatgattctgtgttatcaag

SEQ ID NO: 9863 - RNA, 20 nt, Homo sapiens
  source 1..20: mol_type = genomic RNA
atgattctgtgttatcaagg

SEQ ID NO: 9864 - RNA, 20 nt, Homo sapiens
  source 1..20: mol_type = genomic RNA
tgattctgtgttatcaagga

SEQ ID NO: 9865 - RNA, 20 nt, Homo sapiens
  source 1..20: mol_type = genomic RNA
gattctgtgttatcaaggaa

SEQ ID NO: 9866 - RNA, 20 nt, Homo sapiens
  source 1..20: mol_type = genomic RNA
attctgtgttatcaaggaat

SEQ ID NO: 9867 - RNA, 20 nt, Homo sapiens
  source 1..20: mol_type = genomic RNA
ttctgtgttatcaaggaatt

SEQ ID NO: 9868 - RNA, 20 nt, Homo sapiens
  source 1..20: mol_type = genomic RNA
tctgtgttatcaaggaattg

SEQ ID NO: 9869 - RNA, 20 nt, Homo sapiens
  source 1..20: mol_type = genomic RNA
ctgtgttatcaaggaattgt

SEQ ID NO: 9870 - RNA, 20 nt, Homo sapiens
  source 1..20: mol_type = genomic RNA
tgtgttatcaaggaattgta

SEQ ID NO: 9871 - RNA, 20 nt, Homo sapiens
  source 1..20: mol_type = genomic RNA
gtgttatcaaggaattgtac

SEQ ID NO: 9872 - RNA, 20 nt, Homo sapiens
  source 1..20: mol_type = genomic RNA
tgttatcaaggaattgtact

SEQ ID NO: 9873 - RNA, 20 nt, Homo sapiens
  source 1..20: mol_type = genomic RNA
gttatcaaggaattgtactg

SEQ ID NO: 9874 - RNA, 20 nt, Homo sapiens
  source 1..20: mol_type = genomic RNA
ttatcaaggaattgtactgt

SEQ ID NO: 9875 - RNA, 20 nt, Homo sapiens
  source 1..20: mol_type = genomic RNA
tatcaaggaattgtactgtg

SEQ ID NO: 9876 - RNA, 20 nt, Homo sapiens
  source 1..20: mol_type = genomic RNA
atcaaggaattgtactgtgc

SEQ ID NO: 9877 - RNA, 20 nt, Homo sapiens
  source 1..20: mol_type = genomic RNA
tcaaggaattgtactgtgct

SEQ ID NO: 9878 - RNA, 20 nt, Homo sapiens
  source 1..20: mol_type = genomic RNA
caaggaattgtactgtgcta

SEQ ID NO: 9879 - RNA, 20 nt, Homo sapiens
  source 1..20: mol_type = genomic RNA
aaggaattgtactgtgctac

SEQ ID NO: 9880 - RNA, 20 nt, Homo sapiens
  source 1..20: mol_type = genomic RNA
aggaattgtactgtgctaca

SEQ ID NO: 9881 - RNA, 20 nt, Homo sapiens
  source 1..20: mol_type = genomic RNA
ggaattgtactgtgctacaa

SEQ ID NO: 9882 - RNA, 20 nt, Homo sapiens
  source 1..20: mol_type = genomic RNA
gaattgtactgtgctacaat

SEQ ID NO: 9883 - RNA, 20 nt, Homo sapiens
  source 1..20: mol_type = genomic RNA
aattgtactgtgctacaatt

SEQ ID NO: 9884 - RNA, 20 nt, Homo sapiens
  source 1..20: mol_type = genomic RNA
attgtactgtgctacaatta

SEQ ID NO: 9885 - RNA, 20 nt, Homo sapiens
  source 1..20: mol_type = genomic RNA
ttgtactgtgctacaattat

SEQ ID NO: 9886 - RNA, 20 nt, Homo sapiens
  source 1..20: mol_type = genomic RNA
tgtactgtgctacaattatc

SEQ ID NO: 9887 - RNA, 20 nt, Homo sapiens
  source 1..20: mol_type = genomic RNA
gtactgtgctacaattatct

SEQ ID NO: 9888 - RNA, 20 nt, Homo sapiens
  source 1..20: mol_type = genomic RNA
tactgtgctacaattatctc

SEQ ID NO: 9889 - RNA, 20 nt, Homo sapiens
  source 1..20: mol_type = genomic RNA
actgtgctacaattatctct

SEQ ID NO: 9890 - RNA, 20 nt, Homo sapiens
  source 1..20: mol_type = genomic RNA
ctgtgctacaattatctcta

SEQ ID NO: 9891 - RNA, 20 nt, Homo sapiens
  source 1..20: mol_type = genomic RNA
tgtgctacaattatctctag

SEQ ID NO: 9892 - RNA, 20 nt, Homo sapiens
  source 1..20: mol_type = genomic RNA
gtgctacaattatctctaga

SEQ ID NO: 9893 - RNA, 20 nt, Homo sapiens
  source 1..20: mol_type = genomic RNA
tgctacaattatctctagaa

SEQ ID NO: 9894 - RNA, 20 nt, Homo sapiens
  source 1..20: mol_type = genomic RNA
gctacaattatctctagaat

SEQ ID NO: 9895 - RNA, 20 nt, Homo sapiens
  source 1..20: mol_type = genomic RNA
ctacaattatctctagaatc

SEQ ID NO: 9896 - RNA, 20 nt, Homo sapiens
  source 1..20: mol_type = genomic RNA
tacaattatctctagaatct

SEQ ID NO: 9897 - RNA, 20 nt, Homo sapiens
  source 1..20: mol_type = genomic RNA
acaattatctctagaatctc

SEQ ID NO: 9898 - RNA, 20 nt, Homo sapiens
  source 1..20: mol_type = genomic RNA
caattatctctagaatctcc

SEQ ID NO: 9899 - RNA, 20 nt, Homo sapiens
  source 1..20: mol_type = genomic RNA
aattatctctagaatctcca

SEQ ID NO: 9900 - RNA, 20 nt, Homo sapiens
  source 1..20: mol_type = genomic RNA
attatctctagaatctccag

SEQ ID NO: 9901 - RNA, 20 nt, Homo sapiens
  source 1..20: mol_type = genomic RNA
ttatctctagaatctccaga

SEQ ID NO: 9902 - RNA, 20 nt, Homo sapiens
  source 1..20: mol_type = genomic RNA
tatctctagaatctccagaa

SEQ ID NO: 9903 - RNA, 20 nt, Homo sapiens
  source 1..20: mol_type = genomic RNA
atctctagaatctccagaaa

SEQ ID NO: 9904 - RNA, 20 nt, Homo sapiens
  source 1..20: mol_type = genomic RNA
tctctagaatctccagaaag

SEQ ID NO: 9905 - RNA, 20 nt, Homo sapiens
  source 1..20: mol_type = genomic RNA
ctctagaatctccagaaagg

SEQ ID NO: 9906 - RNA, 20 nt, Homo sapiens
  source 1..20: mol_type = genomic RNA
tctagaatctccagaaaggt

SEQ ID NO: 9907 - RNA, 20 nt, Homo sapiens
  source 1..20: mol_type = genomic RNA
ctagaatctccagaaaggtg

SEQ ID NO: 9908 - RNA, 20 nt, Homo sapiens
  source 1..20: mol_type = genomic RNA
tagaatctccagaaaggtgg

SEQ ID NO: 9909 - RNA, 20 nt, Homo sapiens
  source 1..20: mol_type = genomic RNA
agaatctccagaaaggtgga

SEQ ID NO: 9910 - RNA, 20 nt, Homo sapiens
  source 1..20: mol_type = genomic RNA
gaatctccagaaaggtggag

SEQ ID NO: 9911 - RNA, 20 nt, Homo sapiens
  source 1..20: mol_type = genomic RNA
aatctccagaaaggtggagg

SEQ ID NO: 9912 - RNA, 20 nt, Homo sapiens
  source 1..20: mol_type = genomic RNA
atctccagaaaggtggaggg

SEQ ID NO: 9913 - RNA, 20 nt, Homo sapiens
  source 1..20: mol_type = genomic RNA
tctccagaaaggtggagggc

SEQ ID NO: 9914 - RNA, 20 nt, Homo sapiens
  source 1..20: mol_type = genomic RNA
ctccagaaaggtggagggct

SEQ ID NO: 9915 - RNA, 20 nt, Homo sapiens
  source 1..20: mol_type = genomic RNA
tccagaaaggtggagggctg

SEQ ID NO: 9916 - RNA, 20 nt, Homo sapiens
  source 1..20: mol_type = genomic RNA
ccagaaaggtggagggctgt

SEQ ID NO: 9917 - RNA, 20 nt, Homo sapiens
  source 1..20: mol_type = genomic RNA
cagaaaggtggagggctgtt

SEQ ID NO: 9918 - RNA, 20 nt, Homo sapiens
  source 1..20: mol_type = genomic RNA
agaaaggtggagggctgttc

SEQ ID NO: 9919 - RNA, 20 nt, Homo sapiens
  source 1..20: mol_type = genomic RNA
gaaaggtggagggctgttcg

SEQ ID NO: 9920 - RNA, 20 nt, Homo sapiens
  source 1..20: mol_type = genomic RNA
aaaggtggagggctgttcgc

SEQ ID NO: 9921 - RNA, 20 nt, Homo sapiens
  source 1..20: mol_type = genomic RNA
aaggtggagggctgttcgcc

SEQ ID NO: 9922 - RNA, 20 nt, Homo sapiens
  source 1..20: mol_type = genomic RNA
aggtggagggctgttcgccc

SEQ ID NO: 9923 - RNA, 20 nt, Homo sapiens
  source 1..20: mol_type = genomic RNA
ggtggagggctgttcgccct

SEQ ID NO: 9924 - RNA, 20 nt, Homo sapiens
  source 1..20: mol_type = genomic RNA
gtggagggctgttcgccctt

SEQ ID NO: 9925 - RNA, 20 nt, Homo sapiens
  source 1..20: mol_type = genomic RNA
tggagggctgttcgccctta

SEQ ID NO: 9926 - RNA, 20 nt, Homo sapiens
  source 1..20: mol_type = genomic RNA
ggagggctgttcgcccttac

SEQ ID NO: 9927 - RNA, 20 nt, Homo sapiens
  source 1..20: mol_type = genomic RNA
gagggctgttcgcccttaca

SEQ ID NO: 9928 - RNA, 20 nt, Homo sapiens
  source 1..20: mol_type = genomic RNA
agggctgttcgcccttacac

SEQ ID NO: 9929 - RNA, 20 nt, Homo sapiens
  source 1..20: mol_type = genomic RNA
gggctgttcgcccttacact

SEQ ID NO: 9930 - RNA, 20 nt, Homo sapiens
  source 1..20: mol_type = genomic RNA
ggctgttcgcccttacacta

SEQ ID NO: 9931 - RNA, 20 nt, Homo sapiens
  source 1..20: mol_type = genomic RNA
gctgttcgcccttacactaa

SEQ ID NO: 9932 - RNA, 20 nt, Homo sapiens
  source 1..20: mol_type = genomic RNA
ctgttcgcccttacactaaa

SEQ ID NO: 9933 - RNA, 20 nt, Homo sapiens
  source 1..20: mol_type = genomic RNA
tgttcgcccttacactaaat

SEQ ID NO: 9934 - RNA, 20 nt, Homo sapiens
  source 1..20: mol_type = genomic RNA
gttcgcccttacactaaatg

SEQ ID NO: 9935 - RNA, 20 nt, Homo sapiens
  source 1..20: mol_type = genomic RNA
ttcgcccttacactaaatgg

SEQ ID NO: 9936 - RNA, 20 nt, Homo sapiens
  source 1..20: mol_type = genomic RNA
tcgcccttacactaaatggt

SEQ ID NO: 9937 - RNA, 20 nt, Homo sapiens
  source 1..20: mol_type = genomic RNA
cgcccttacactaaatggtc

SEQ ID NO: 9938 - RNA, 20 nt, Homo sapiens
  source 1..20: mol_type = genomic RNA
gcccttacactaaatggtct

SEQ ID NO: 9939 - RNA, 20 nt, Homo sapiens
  source 1..20: mol_type = genomic RNA
cccttacactaaatggtctc

SEQ ID NO: 9940 - RNA, 20 nt, Homo sapiens
  source 1..20: mol_type = genomic RNA
ccttacactaaatggtctca

SEQ ID NO: 9941 - RNA, 20 nt, Homo sapiens
  source 1..20: mol_type = genomic RNA
cttacactaaatggtctcag

SEQ ID NO: 9942 - RNA, 20 nt, Homo sapiens
  source 1..20: mol_type = genomic RNA
ttacactaaatggtctcagt

SEQ ID NO: 9943 - RNA, 20 nt, Homo sapiens
  source 1..20: mol_type = genomic RNA
tacactaaatggtctcagtt

SEQ ID NO: 9944 - RNA, 20 nt, Homo sapiens
  source 1..20: mol_type = genomic RNA
acactaaatggtctcagttg

SEQ ID NO: 9945 - RNA, 20 nt, Homo sapiens
  source 1..20: mol_type = genomic RNA
cactaaatggtctcagttgg

SEQ ID NO: 9946 - RNA, 20 nt, Homo sapiens
  source 1..20: mol_type = genomic RNA
actaaatggtctcagttgga

SEQ ID NO: 9947 - RNA, 20 nt, Homo sapiens
  source 1..20: mol_type = genomic RNA
ctaaatggtctcagttggat

SEQ ID NO: 9948 - RNA, 20 nt, Homo sapiens
  source 1..20: mol_type = genomic RNA
taaatggtctcagttggatt

SEQ ID NO: 9949 - RNA, 20 nt, Homo sapiens
  source 1..20: mol_type = genomic RNA
aaatggtctcagttggattt

SEQ ID NO: 9950 - RNA, 20 nt, Homo sapiens
  source 1..20: mol_type = genomic RNA
aatggtctcagttggatttt

SEQ ID NO: 9951 - RNA, 20 nt, Homo sapiens
  source 1..20: mol_type = genomic RNA
atggtctcagttggattttt

SEQ ID NO: 9952 - RNA, 20 nt, Homo sapiens
  source 1..20: mol_type = genomic RNA
tggtctcagttggatttttt

SEQ ID NO: 9953 - RNA, 20 nt, Homo sapiens
  source 1..20: mol_type = genomic RNA
ggtctcagttggattttttt

SEQ ID NO: 9954 - RNA, 20 nt, Homo sapiens
  source 1..20: mol_type = genomic RNA
gtctcagttggatttttttt

SEQ ID NO: 9955 - RNA, 20 nt, Homo sapiens
  source 1..20: mol_type = genomic RNA
tctcagttggattttttttt

SEQ ID NO: 9956 - RNA, 20 nt, Homo sapiens
  source 1..20: mol_type = genomic RNA
ctcagttggatttttttttc

SEQ ID NO: 9957 - RNA, 20 nt, Homo sapiens
  source 1..20: mol_type = genomic RNA
tcagttggatttttttttcc

SEQ ID NO: 9958 - RNA, 20 nt, Homo sapiens
  source 1..20: mol_type = genomic RNA
cagttggatttttttttcct

SEQ ID NO: 9959 - RNA, 20 nt, Homo sapiens
  source 1..20: mol_type = genomic RNA
agttggatttttttttcctg

SEQ ID NO: 9960 - RNA, 20 nt, Homo sapiens
  source 1..20: mol_type = genomic RNA
gttggatttttttttcctgt

SEQ ID NO: 9961 - RNA, 20 nt, Homo sapiens
  source 1..20: mol_type = genomic RNA
ttggatttttttttcctgtt

SEQ ID NO: 9962 - RNA, 20 nt, Homo sapiens
  source 1..20: mol_type = genomic RNA
tggatttttttttcctgttt

SEQ ID NO: 9963 - RNA, 20 nt, Homo sapiens
  source 1..20: mol_type = genomic RNA
ggatttttttttcctgtttt

SEQ ID NO: 9964 - RNA, 20 nt, Homo sapiens
  source 1..20: mol_type = genomic RNA
gatttttttttcctgttttc

SEQ ID NO: 9965 - RNA, 20 nt, Homo sapiens
  source 1..20: mol_type = genomic RNA
atttttttttcctgttttct

SEQ ID NO: 9966 - RNA, 20 nt, Homo sapiens
  source 1..20: mol_type = genomic RNA
tttttttttcctgttttcta

SEQ ID NO: 9967 - RNA, 20 nt, Homo sapiens
  source 1..20: mol_type = genomic RNA
ttttttttcctgttttctat

SEQ ID NO: 9968 - RNA, 20 nt, Homo sapiens
  source 1..20: mol_type = genomic RNA
tttttttcctgttttctatt

SEQ ID NO: 9969 - RNA, 20 nt, Homo sapiens
  source 1..20: mol_type = genomic RNA
ttttttcctgttttctattt

SEQ ID NO: 9970 - RNA, 20 nt, Homo sapiens
  source 1..20: mol_type = genomic RNA
tttttcctgttttctatttc

SEQ ID NO: 9971 - RNA, 20 nt, Homo sapiens
  source 1..20: mol_type = genomic RNA
ttttcctgttttctatttcc

SEQ ID NO: 9972 - RNA, 20 nt, Homo sapiens
  source 1..20: mol_type = genomic RNA
tttcctgttttctatttcct

SEQ ID NO: 9973 - RNA, 20 nt, Homo sapiens
  source 1..20: mol_type = genomic RNA
ttcctgttttctatttcctc

SEQ ID NO: 9974 - RNA, 20 nt, Homo sapiens
  source 1..20: mol_type = genomic RNA
tcctgttttctatttcctct

SEQ ID NO: 9975 - RNA, 20 nt, Homo sapiens
  source 1..20: mol_type = genomic RNA
cctgttttctatttcctctt

SEQ ID NO: 9976 - RNA, 20 nt, Homo sapiens
  source 1..20: mol_type = genomic RNA
ctgttttctatttcctctta

SEQ ID NO: 9977 - RNA, 20 nt, Homo sapiens
  source 1..20: mol_type = genomic RNA
tgttttctatttcctcttaa

SEQ ID NO: 9978 - RNA, 20 nt, Homo sapiens
  source 1..20: mol_type = genomic RNA
gttttctatttcctcttaag

SEQ ID NO: 9979 - RNA, 20 nt, Homo sapiens
  source 1..20: mol_type = genomic RNA
ttttctatttcctcttaagt

SEQ ID NO: 9980 - RNA, 20 nt, Homo sapiens
  source 1..20: mol_type = genomic RNA
tttctatttcctcttaagta

SEQ ID NO: 9981 - RNA, 20 nt, Homo sapiens
  source 1..20: mol_type = genomic RNA
ttctatttcctcttaagtac

SEQ ID NO: 9982 - RNA, 20 nt, Homo sapiens
  source 1..20: mol_type = genomic RNA
tctatttcctcttaagtaca

SEQ ID NO: 9983 - RNA, 20 nt, Homo sapiens
  source 1..20: mol_type = genomic RNA
ctatttcctcttaagtacac

SEQ ID NO: 9984 - RNA, 20 nt, Homo sapiens
  source 1..20: mol_type = genomic RNA
tatttcctcttaagtacacc

SEQ ID NO: 9985 - RNA, 20 nt, Homo sapiens
  source 1..20: mol_type = genomic RNA
atttcctcttaagtacacct

SEQ ID NO: 9986 - RNA, 20 nt, Homo sapiens
  source 1..20: mol_type = genomic RNA
tttcctcttaagtacacctt

SEQ ID NO: 9987 - RNA, 20 nt, Homo sapiens
  source 1..20: mol_type = genomic RNA
ttcctcttaagtacaccttc

SEQ ID NO: 9988 - RNA, 20 nt, Homo sapiens
  source 1..20: mol_type = genomic RNA
tcctcttaagtacaccttca

SEQ ID NO: 9989 - RNA, 20 nt, Homo sapiens
  source 1..20: mol_type = genomic RNA
cctcttaagtacaccttcaa

SEQ ID NO: 9990 - RNA, 20 nt, Homo sapiens
  source 1..20: mol_type = genomic RNA
ctcttaagtacaccttcaac

SEQ ID NO: 9991 - RNA, 20 nt, Homo sapiens
  source 1..20: mol_type = genomic RNA
tcttaagtacaccttcaact

SEQ ID NO: 9992 - RNA, 20 nt, Homo sapiens
  source 1..20: mol_type = genomic RNA
cttaagtacaccttcaacta

SEQ ID NO: 9993 - RNA, 20 nt, Homo sapiens
  source 1..20: mol_type = genomic RNA
ttaagtacaccttcaactat

SEQ ID NO: 9994 - RNA, 20 nt, Homo sapiens
  source 1..20: mol_type = genomic RNA
taagtacaccttcaactata

SEQ ID NO: 9995 - RNA, 20 nt, Homo sapiens
  source 1..20: mol_type = genomic RNA
aagtacaccttcaactatat

SEQ ID NO: 9996 - RNA, 20 nt, Homo sapiens
  source 1..20: mol_type = genomic RNA
agtacaccttcaactatatt

SEQ ID NO: 9997 - RNA, 20 nt, Homo sapiens
  source 1..20: mol_type = genomic RNA
gtacaccttcaactatattc

SEQ ID NO: 9998 - RNA, 20 nt, Homo sapiens
  source 1..20: mol_type = genomic RNA
tacaccttcaactatattcc

SEQ ID NO: 9999 - RNA, 20 nt, Homo sapiens
  source 1..20: mol_type = genomic RNA
acaccttcaactatattccc

SEQ ID NO: 10000 - RNA, 20 nt, Homo sapiens
  source 1..20: mol_type = genomic RNA
caccttcaactatattccca

SEQ ID NO: 10001 - RNA, 20 nt, Homo sapiens
  source 1..20: mol_type = genomic RNA
accttcaactatattcccat

SEQ ID NO: 10002 - RNA, 20 nt, Homo sapiens
  source 1..20: mol_type = genomic RNA
ccttcaactatattcccatc

SEQ ID NO: 10003 - RNA, 20 nt, Homo sapiens
  source 1..20: mol_type = genomic RNA
cttcaactatattcccatcc

SEQ ID NO: 10004 - RNA, 20 nt, Homo sapiens
  source 1..20: mol_type = genomic RNA
ttcaactatattcccatccc

SEQ ID NO: 10005 - RNA, 20 nt, Homo sapiens
  source 1..20: mol_type = genomic RNA
tcaactatattcccatccct

SEQ ID NO: 10006 - RNA, 20 nt, Homo sapiens
  source 1..20: mol_type = genomic RNA
caactatattcccatccctc

SEQ ID NO: 10007 - RNA, 20 nt, Homo sapiens
  source 1..20: mol_type = genomic RNA
aactatattcccatccctct

SEQ ID NO: 10008 - RNA, 20 nt, Homo sapiens
  source 1..20: mol_type = genomic RNA
actatattcccatccctcta

SEQ ID NO: 10009 - RNA, 20 nt, Homo sapiens
  source 1..20: mol_type = genomic RNA
ctatattcccatccctctat

SEQ ID NO: 10010 - RNA, 20 nt, Homo sapiens
  source 1..20: mol_type = genomic RNA
tatattcccatccctctatt

SEQ ID NO: 10011 - RNA, 20 nt, Homo sapiens
  source 1..20: mol_type = genomic RNA
atattcccatccctctattt

SEQ ID NO: 10012 - RNA, 20 nt, Homo sapiens
  source 1..20: mol_type = genomic RNA
tattcccatccctctatttt

SEQ ID NO: 10013 - RNA, 20 nt, Homo sapiens
  source 1..20: mol_type = genomic RNA
attcccatccctctatttta

SEQ ID NO: 10014 - RNA, 20 nt, Homo sapiens
  source 1..20: mol_type = genomic RNA
ttcccatccctctattttaa

SEQ ID NO: 10015 - RNA, 20 nt, Homo sapiens
  source 1..20: mol_type = genomic RNA
tcccatccctctattttaat

SEQ ID NO: 10016 - RNA, 20 nt, Homo sapiens
  source 1..20: mol_type = genomic RNA
cccatccctctattttaatc

SEQ ID NO: 10017 - RNA, 20 nt, Homo sapiens
  source 1..20: mol_type = genomic RNA
ccatccctctattttaatct

SEQ ID NO: 10018 - RNA, 20 nt, Homo sapiens
  source 1..20: mol_type = genomic RNA
catccctctattttaatctg

SEQ ID NO: 10019 - RNA, 20 nt, Homo sapiens
  source 1..20: mol_type = genomic RNA
atccctctattttaatctgt

SEQ ID NO: 10020 - RNA, 20 nt, Homo sapiens
  source 1..20: mol_type = genomic RNA
tccctctattttaatctgtt

SEQ ID NO: 10021 - RNA, 20 nt, Homo sapiens
  source 1..20: mol_type = genomic RNA
ccctctattttaatctgtta

SEQ ID NO: 10022 - RNA, 20 nt, Homo sapiens
  source 1..20: mol_type = genomic RNA
cctctattttaatctgttat

SEQ ID NO: 10023 - RNA, 20 nt, Homo sapiens
  source 1..20: mol_type = genomic RNA
ctctattttaatctgttatg

SEQ ID NO: 10024 - RNA, 20 nt, Homo sapiens
  source 1..20: mol_type = genomic RNA
tctattttaatctgttatga

SEQ ID NO: 10025 - RNA, 20 nt, Homo sapiens
  source 1..20: mol_type = genomic RNA
ctattttaatctgttatgaa

SEQ ID NO: 10026 - RNA, 20 nt, Homo sapiens
  source 1..20: mol_type = genomic RNA
tattttaatctgttatgaag

SEQ ID NO: 10027 - RNA, 20 nt, Homo sapiens
  source 1..20: mol_type = genomic RNA
attttaatctgttatgaagg

SEQ ID NO: 10028 - RNA, 20 nt, Homo sapiens
  source 1..20: mol_type = genomic RNA
ttttaatctgttatgaagga

SEQ ID NO: 10029 - RNA, 20 nt, Homo sapiens
  source 1..20: mol_type = genomic RNA
tttaatctgttatgaaggaa

SEQ ID NO: 10030 - RNA, 20 nt, Homo sapiens
  source 1..20: mol_type = genomic RNA
ttaatctgttatgaaggaag

SEQ ID NO: 10031 - RNA, 20 nt, Homo sapiens
  source 1..20: mol_type = genomic RNA
taatctgttatgaaggaagg

SEQ ID NO: 10032 - RNA, 20 nt, Homo sapiens
  source 1..20: mol_type = genomic RNA
aatctgttatgaaggaaggt

SEQ ID NO: 10033 - RNA, 20 nt, Homo sapiens
  source 1..20: mol_type = genomic RNA
atctgttatgaaggaaggta

SEQ ID NO: 10034 - RNA, 20 nt, Homo sapiens
  source 1..20: mol_type = genomic RNA
tctgttatgaaggaaggtaa

SEQ ID NO: 10035 - RNA, 20 nt, Homo sapiens
  source 1..20: mol_type = genomic RNA
ctgttatgaaggaaggtaaa

SEQ ID NO: 10036 - RNA, 20 nt, Homo sapiens
  source 1..20: mol_type = genomic RNA
tgttatgaaggaaggtaaat

SEQ ID NO: 10037 - RNA, 20 nt, Homo sapiens
  source 1..20: mol_type = genomic RNA
gttatgaaggaaggtaaata

SEQ ID NO: 10038 - RNA, 20 nt, Homo sapiens
  source 1..20: mol_type = genomic RNA
ttatgaaggaaggtaaataa

SEQ ID NO: 10039 - RNA, 20 nt, Homo sapiens
  source 1..20: mol_type = genomic RNA
tatgaaggaaggtaaataaa

SEQ ID NO: 10040 - RNA, 20 nt, Homo sapiens
  source 1..20: mol_type = genomic RNA
atgaaggaaggtaaataaaa

SEQ ID NO: 10041 - RNA, 20 nt, Homo sapiens
  source 1..20: mol_type = genomic RNA
tgaaggaaggtaaataaaaa

SEQ ID NO: 10042 - RNA, 20 nt, Homo sapiens
  source 1..20: mol_type = genomic RNA
gaaggaaggtaaataaaaat

SEQ ID NO: 10043 - RNA, 20 nt, Homo sapiens
  source 1..20: mol_type = genomic RNA
aaggaaggtaaataaaaatg

SEQ ID NO: 10044 - RNA, 20 nt, Homo sapiens
  source 1..20: mol_type = genomic RNA
aggaaggtaaataaaaatgc

SEQ ID NO: 10045 - RNA, 20 nt, Homo sapiens
  source 1..20: mol_type = genomic RNA
ggaaggtaaataaaaatgct

SEQ ID NO: 10046 - RNA, 20 nt, Homo sapiens
  source 1..20: mol_type = genomic RNA
gaaggtaaataaaaatgcta

SEQ ID NO: 10047 - RNA, 20 nt, Homo sapiens
  source 1..20: mol_type = genomic RNA
aaggtaaataaaaatgctaa

SEQ ID NO: 10048 - RNA, 20 nt, Homo sapiens
  source 1..20: mol_type = genomic RNA
aggtaaataaaaatgctaaa

SEQ ID NO: 10049 - RNA, 20 nt, Homo sapiens
  source 1..20: mol_type = genomic RNA
ggtaaataaaaatgctaaat

SEQ ID NO: 10050 - RNA, 20 nt, Homo sapiens
  source 1..20: mol_type = genomic RNA
gtaaataaaaatgctaaata

SEQ ID NO: 10051 - RNA, 20 nt, Homo sapiens
  source 1..20: mol_type = genomic RNA
taaataaaaatgctaaatag

SEQ ID NO: 10052 - RNA, 20 nt, Homo sapiens
  source 1..20: mol_type = genomic RNA
aaataaaaatgctaaataga

SEQ ID NO: 10053 - RNA, 20 nt, Homo sapiens
  source 1..20: mol_type = genomic RNA
aataaaaatgctaaatagaa

SEQ ID NO: 10054 - RNA, 20 nt, Homo sapiens
  source 1..20: mol_type = genomic RNA
ataaaaatgctaaatagaag

SEQ ID NO: 10055 - RNA, 20 nt, Homo sapiens
  source 1..20: mol_type = genomic RNA
taaaaatgctaaatagaaga

SEQ ID NO: 10056 - RNA, 20 nt, Homo sapiens
  source 1..20: mol_type = genomic RNA
aaaaatgctaaatagaagaa

SEQ ID NO: 10057 - RNA, 20 nt, Homo sapiens
  source 1..20: mol_type = genomic RNA
aaaatgctaaatagaagaaa

SEQ ID NO: 10058 - RNA, 20 nt, Homo sapiens
  source 1..20: mol_type = genomic RNA
aaatgctaaatagaagaaat

SEQ ID NO: 10059 - RNA, 20 nt, Homo sapiens
  source 1..20: mol_type = genomic RNA
aatgctaaatagaagaaatt

SEQ ID NO: 10060 - RNA, 20 nt, Homo sapiens
  source 1..20: mol_type = genomic RNA
atgctaaatagaagaaattg

SEQ ID NO: 10061 - RNA, 20 nt, Homo sapiens
  source 1..20: mol_type = genomic RNA
tgctaaatagaagaaattgt

SEQ ID NO: 10062 - RNA, 20 nt, Homo sapiens
  source 1..20: mol_type = genomic RNA
gctaaatagaagaaattgta

SEQ ID NO: 10063 - RNA, 20 nt, Homo sapiens
  source 1..20: mol_type = genomic RNA
ctaaatagaagaaattgtag

SEQ ID NO: 10064 - RNA, 20 nt, Homo sapiens
  source 1..20: mol_type = genomic RNA
taaatagaagaaattgtagg

SEQ ID NO: 10065 - RNA, 20 nt, Homo sapiens
  source 1..20: mol_type = genomic RNA
aaatagaagaaattgtaggt

SEQ ID NO: 10066 - RNA, 20 nt, Homo sapiens
  source 1..20: mol_type = genomic RNA
aatagaagaaattgtaggta

SEQ ID NO: 10067 - RNA, 20 nt, Homo sapiens
  source 1..20: mol_type = genomic RNA
atagaagaaattgtaggtaa

SEQ ID NO: 10068 - RNA, 20 nt, Homo sapiens
  source 1..20: mol_type = genomic RNA
tagaagaaattgtaggtaag

SEQ ID NO: 10069 - RNA, 20 nt, Homo sapiens
  source 1..20: mol_type = genomic RNA
agaagaaattgtaggtaagg

SEQ ID NO: 10070 - RNA, 20 nt, Homo sapiens
  source 1..20: mol_type = genomic RNA
gaagaaattgtaggtaaggt

SEQ ID NO: 10071 - RNA, 20 nt, Homo sapiens
  source 1..20: mol_type = genomic RNA
aagaaattgtaggtaaggta

SEQ ID NO: 10072 - RNA, 20 nt, Homo sapiens
  source 1..20: mol_type = genomic RNA
agaaattgtaggtaaggtaa

SEQ ID NO: 10073 - RNA, 20 nt, Homo sapiens
  source 1..20: mol_type = genomic RNA
gaaattgtaggtaaggtaag

SEQ ID NO: 10074 - RNA, 20 nt, Homo sapiens
  source 1..20: mol_type = genomic RNA
aaattgtaggtaaggtaaga

SEQ ID NO: 10075 - RNA, 20 nt, Homo sapiens
  source 1..20: mol_type = genomic RNA
aattgtaggtaaggtaagag

SEQ ID NO: 10076 - RNA, 20 nt, Homo sapiens
  source 1..20: mol_type = genomic RNA
attgtaggtaaggtaagagg

SEQ ID NO: 10077 - RNA, 20 nt, Homo sapiens
  source 1..20: mol_type = genomic RNA
ttgtaggtaaggtaagagga

SEQ ID NO: 10078 - RNA, 20 nt, Homo sapiens
  source 1..20: mol_type = genomic RNA
tgtaggtaaggtaagaggaa

SEQ ID NO: 10079 - RNA, 20 nt, Homo sapiens
  source 1..20: mol_type = genomic RNA
gtaggtaaggtaagaggaat

SEQ ID NO: 10080 - RNA, 20 nt, Homo sapiens
  source 1..20: mol_type = genomic RNA
taggtaaggtaagaggaatc

SEQ ID NO: 10081 - RNA, 20 nt, Homo sapiens
  source 1..20: mol_type = genomic RNA
aggtaaggtaagaggaatca

SEQ ID NO: 10082 - RNA, 20 nt, Homo sapiens
  source 1..20: mol_type = genomic RNA
ggtaaggtaagaggaatcaa

SEQ ID NO: 10083 - RNA, 20 nt, Homo sapiens
  source 1..20: mol_type = genomic RNA
gtaaggtaagaggaatcaag

SEQ ID NO: 10084 - RNA, 20 nt, Homo sapiens
  source 1..20: mol_type = genomic RNA
taaggtaagaggaatcaagt

SEQ ID NO: 10085 - RNA, 20 nt, Homo sapiens
  source 1..20: mol_type = genomic RNA
aaggtaagaggaatcaagtt

SEQ ID NO: 10086 - RNA, 20 nt, Homo sapiens
  source 1..20: mol_type = genomic RNA
aggtaagaggaatcaagttc

SEQ ID NO: 10087 - RNA, 20 nt, Homo sapiens
  source 1..20: mol_type = genomic RNA
ggtaagaggaatcaagttct

SEQ ID NO: 10088 - RNA, 20 nt, Homo sapiens
  source 1..20: mol_type = genomic RNA
gtaagaggaatcaagttctg

SEQ ID NO: 10089 - RNA, 20 nt, Homo sapiens
  source 1..20: mol_type = genomic RNA
taagaggaatcaagttctga

SEQ ID NO: 10090 - RNA, 20 nt, Homo sapiens
  source 1..20: mol_type = genomic RNA
aagaggaatcaagttctgag

SEQ ID NO: 10091 - RNA, 20 nt, Homo sapiens
  source 1..20: mol_type = genomic RNA
agaggaatcaagttctgagt

SEQ ID NO: 10092 - RNA, 20 nt, Homo sapiens
  source 1..20: mol_type = genomic RNA
gaggaatcaagttctgagtg

SEQ ID NO: 10093 - RNA, 20 nt, Homo sapiens
  source 1..20: mol_type = genomic RNA
aggaatcaagttctgagtgg

SEQ ID NO: 10094 - RNA, 20 nt, Homo sapiens
  source 1..20: mol_type = genomic RNA
ggaatcaagttctgagtggc

SEQ ID NO: 10095 - RNA, 20 nt, Homo sapiens
  source 1..20: mol_type = genomic RNA
gaatcaagttctgagtggct

SEQ ID NO: 10096 - RNA, 20 nt, Homo sapiens
  source 1..20: mol_type = genomic RNA
aatcaagttctgagtggctg

SEQ ID NO: 10097 - RNA, 20 nt, Homo sapiens
  source 1..20: mol_type = genomic RNA
atcaagttctgagtggctgc

SEQ ID NO: 10098 - RNA, 20 nt, Homo sapiens
  source 1..20: mol_type = genomic RNA
tcaagttctgagtggctgcc

SEQ ID NO: 10099 - RNA, 20 nt, Homo sapiens
  source 1..20: mol_type = genomic RNA
caagttctgagtggctgcca

SEQ ID NO: 10100 - RNA, 20 nt, Homo sapiens
  source 1..20: mol_type = genomic RNA
aagttctgagtggctgccaa

SEQ ID NO: 10101 - RNA, 20 nt, Homo sapiens
  source 1..20: mol_type = genomic RNA
agttctgagtggctgccaag

SEQ ID NO: 10102 - RNA, 20 nt, Homo sapiens
  source 1..20: mol_type = genomic RNA
gttctgagtggctgccaagg

SEQ ID NO: 10103 - RNA, 20 nt, Homo sapiens
  source 1..20: mol_type = genomic RNA
ttctgagtggctgccaaggc

SEQ ID NO: 10104 - RNA, 20 nt, Homo sapiens
  source 1..20: mol_type = genomic RNA
tctgagtggctgccaaggca

SEQ ID NO: 10105 - RNA, 20 nt, Homo sapiens
  source 1..20: mol_type = genomic RNA
ctgagtggctgccaaggcac

SEQ ID NO: 10106 - RNA, 20 nt, Homo sapiens
  source 1..20: mol_type = genomic RNA
tgagtggctgccaaggcact

SEQ ID NO: 10107 - RNA, 20 nt, Homo sapiens
  source 1..20: mol_type = genomic RNA
gagtggctgccaaggcactc

SEQ ID NO: 10108 - RNA, 20 nt, Homo sapiens
  source 1..20: mol_type = genomic RNA
agtggctgccaaggcactca

SEQ ID NO: 10109 - RNA, 20 nt, Homo sapiens
  source 1..20: mol_type = genomic RNA
gtggctgccaaggcactcac

SEQ ID NO: 10110 - RNA, 20 nt, Homo sapiens
  source 1..20: mol_type = genomic RNA
tggctgccaaggcactcaca

SEQ ID NO: 10111 - RNA, 20 nt, Homo sapiens
  source 1..20: mol_type = genomic RNA
ggctgccaaggcactcacag

SEQ ID NO: 10112 - RNA, 20 nt, Homo sapiens
  source 1..20: mol_type = genomic RNA
gctgccaaggcactcacaga

SEQ ID NO: 10113 - RNA, 20 nt, Homo sapiens
  source 1..20: mol_type = genomic RNA
ctgccaaggcactcacagaa

SEQ ID NO: 10114 - RNA, 20 nt, Homo sapiens
  source 1..20: mol_type = genomic RNA
tgccaaggcactcacagaat

SEQ ID NO: 10115 - RNA, 20 nt, Homo sapiens
  source 1..20: mol_type = genomic RNA
gccaaggcactcacagaatc

SEQ ID NO: 10116 - RNA, 20 nt, Homo sapiens
  source 1..20: mol_type = genomic RNA
ccaaggcactcacagaatca

SEQ ID NO: 10117 - RNA, 20 nt, Homo sapiens
  source 1..20: mol_type = genomic RNA
caaggcactcacagaatcat

SEQ ID NO: 10118 - RNA, 20 nt, Homo sapiens
  source 1..20: mol_type = genomic RNA
aaggcactcacagaatcata

SEQ ID NO: 10119 - RNA, 20 nt, Homo sapiens
  source 1..20: mol_type = genomic RNA
aggcactcacagaatcataa

SEQ ID NO: 10120 - RNA, 20 nt, Homo sapiens
  source 1..20: mol_type = genomic RNA
ggcactcacagaatcataat

SEQ ID NO: 10121 - RNA, 20 nt, Homo sapiens
  source 1..20: mol_type = genomic RNA
gcactcacagaatcataatc

SEQ ID NO: 10122 - RNA, 20 nt, Homo sapiens
  source 1..20: mol_type = genomic RNA
cactcacagaatcataatca

SEQ ID NO: 10123 - RNA, 20 nt, Homo sapiens
  source 1..20: mol_type = genomic RNA
actcacagaatcataatcat

SEQ ID NO: 10124 - RNA, 20 nt, Homo sapiens
  source 1..20: mol_type = genomic RNA
ctcacagaatcataatcatg

SEQ ID NO: 10125 - RNA, 20 nt, Homo sapiens
  source 1..20: mol_type = genomic RNA
tcacagaatcataatcatgg

SEQ ID NO: 10126 - RNA, 20 nt, Homo sapiens
  source 1..20: mol_type = genomic RNA
cacagaatcataatcatggc

SEQ ID NO: 10127 - RNA, 20 nt, Homo sapiens
  source 1..20: mol_type = genomic RNA
acagaatcataatcatggct

SEQ ID NO: 10128 - RNA, 20 nt, Homo sapiens
  source 1..20: mol_type = genomic RNA
cagaatcataatcatggcta

SEQ ID NO: 10129 - RNA, 20 nt, Homo sapiens
  source 1..20: mol_type = genomic RNA
agaatcataatcatggctaa

SEQ ID NO: 10130 - RNA, 20 nt, Homo sapiens
  source 1..20: mol_type = genomic RNA
gaatcataatcatggctaaa

SEQ ID NO: 10131 - RNA, 20 nt, Homo sapiens
  source 1..20: mol_type = genomic RNA
aatcataatcatggctaaat

SEQ ID NO: 10132 - RNA, 20 nt, Homo sapiens
  source 1..20: mol_type = genomic RNA
atcataatcatggctaaata

SEQ ID NO: 10133 - RNA, 20 nt, Homo sapiens
  source 1..20: mol_type = genomic RNA
tcataatcatggctaaatat

SEQ ID NO: 10134 - RNA, 20 nt, Homo sapiens
  source 1..20: mol_type = genomic RNA
cataatcatggctaaatatt

SEQ ID NO: 10135 - RNA, 20 nt, Homo sapiens
  source 1..20: mol_type = genomic RNA
ataatcatggctaaatattt

SEQ ID NO: 10136 - RNA, 20 nt, Homo sapiens
  source 1..20: mol_type = genomic RNA
taatcatggctaaatattta

SEQ ID NO: 10137 - RNA, 20 nt, Homo sapiens
  source 1..20: mol_type = genomic RNA
aatcatggctaaatatttat

SEQ ID NO: 10138 - RNA, 20 nt, Homo sapiens
  source 1..20: mol_type = genomic RNA
atcatggctaaatatttatg

SEQ ID NO: 10139 - RNA, 20 nt, Homo sapiens
  source 1..20: mol_type = genomic RNA
tcatggctaaatatttatgg

SEQ ID NO: 10140 - RNA, 20 nt, Homo sapiens
  source 1..20: mol_type = genomic RNA
catggctaaatatttatgga

SEQ ID NO: 10141 - RNA, 20 nt, Homo sapiens
  source 1..20: mol_type = genomic RNA
atggctaaatatttatggag

SEQ ID NO: 10142 - RNA, 20 nt, Homo sapiens
  source 1..20: mol_type = genomic RNA
tggctaaatatttatggagg

SEQ ID NO: 10143 - RNA, 20 nt, Homo sapiens
  source 1..20: mol_type = genomic RNA
ggctaaatatttatggaggg

SEQ ID NO: 10144 - RNA, 20 nt, Homo sapiens
  source 1..20: mol_type = genomic RNA
gctaaatatttatggagggc

SEQ ID NO: 10145 - RNA, 20 nt, Homo sapiens
  source 1..20: mol_type = genomic RNA
ctaaatatttatggagggcc

SEQ ID NO: 10146 - RNA, 20 nt, Homo sapiens
  source 1..20: mol_type = genomic RNA
taaatatttatggagggcct

SEQ ID NO: 10147 - RNA, 20 nt, Homo sapiens
  source 1..20: mol_type = genomic RNA
aaatatttatggagggccta

SEQ ID NO: 10148 - RNA, 20 nt, Homo sapiens
  source 1..20: mol_type = genomic RNA
aatatttatggagggcctac

SEQ ID NO: 10149 - RNA, 20 nt, Homo sapiens
  source 1..20: mol_type = genomic RNA
atatttatggagggcctact

SEQ ID NO: 10150 - RNA, 20 nt, Homo sapiens
  source 1..20: mol_type = genomic RNA
tatttatggagggcctactg

SEQ ID NO: 10151 - RNA, 20 nt, Homo sapiens
  source 1..20: mol_type = genomic RNA
atttatggagggcctactgt

SEQ ID NO: 10152 - RNA, 20 nt, Homo sapiens
  source 1..20: mol_type = genomic RNA
tttatggagggcctactgtg

SEQ ID NO: 10153 - RNA, 20 nt, Homo sapiens
  source 1..20: mol_type = genomic RNA
ttatggagggcctactgtgg

SEQ ID NO: 10154 - RNA, 20 nt, Homo sapiens
  source 1..20: mol_type = genomic RNA
tatggagggcctactgtgga

SEQ ID NO: 10155 - RNA, 20 nt, Homo sapiens
  source 1..20: mol_type = genomic RNA
atggagggcctactgtggac

SEQ ID NO: 10156 - RNA, 20 nt, Homo sapiens
  source 1..20: mol_type = genomic RNA
tggagggcctactgtggacc

SEQ ID NO: 10157 - RNA, 20 nt, Homo sapiens
  source 1..20: mol_type = genomic RNA
ggagggcctactgtggacca

SEQ ID NO: 10158 - RNA, 20 nt, Homo sapiens
  source 1..20: mol_type = genomic RNA
gagggcctactgtggaccag

SEQ ID NO: 10159 - RNA, 20 nt, Homo sapiens
  source 1..20: mol_type = genomic RNA
agggcctactgtggaccagg

SEQ ID NO: 10160 - RNA, 20 nt, Homo sapiens
  source 1..20: mol_type = genomic RNA
gggcctactgtggaccaggc

SEQ ID NO: 10161 - RNA, 20 nt, Homo sapiens
  source 1..20: mol_type = genomic RNA
ggcctactgtggaccaggca

SEQ ID NO: 10162 - RNA, 20 nt, Homo sapiens
  source 1..20: mol_type = genomic RNA
gcctactgtggaccaggcac

SEQ ID NO: 10163 - RNA, 20 nt, Homo sapiens
  source 1..20: mol_type = genomic RNA
cctactgtggaccaggcact

SEQ ID NO: 10164 - RNA, 20 nt, Homo sapiens
  source 1..20: mol_type = genomic RNA
ctactgtggaccaggcactg

SEQ ID NO: 10165 - RNA, 20 nt, Homo sapiens
  source 1..20: mol_type = genomic RNA
tactgtggaccaggcactgg

SEQ ID NO: 10166 - RNA, 20 nt, Homo sapiens
  source 1..20: mol_type = genomic RNA
actgtggaccaggcactggg

SEQ ID NO: 10167 - RNA, 20 nt, Homo sapiens
  source 1..20: mol_type = genomic RNA
ctgtggaccaggcactgggc

SEQ ID NO: 10168 - RNA, 20 nt, Homo sapiens
  source 1..20: mol_type = genomic RNA
tgtggaccaggcactgggct

SEQ ID NO: 10169 - RNA, 20 nt, Homo sapiens
  source 1..20: mol_type = genomic RNA
gtggaccaggcactgggcta

SEQ ID NO: 10170 - RNA, 20 nt, Homo sapiens
  source 1..20: mol_type = genomic RNA
tggaccaggcactgggctaa

SEQ ID NO: 10171 - RNA, 20 nt, Homo sapiens
  source 1..20: mol_type = genomic RNA
ggaccaggcactgggctaaa

SEQ ID NO: 10172 - RNA, 20 nt, Homo sapiens
  source 1..20: mol_type = genomic RNA
gaccaggcactgggctaaat

SEQ ID NO: 10173 - RNA, 20 nt, Homo sapiens
  source 1..20: mol_type = genomic RNA
accaggcactgggctaaata

SEQ ID NO: 10174 - RNA, 20 nt, Homo sapiens
  source 1..20: mol_type = genomic RNA
ccaggcactgggctaaatac

SEQ ID NO: 10175 - RNA, 20 nt, Homo sapiens
  source 1..20: mol_type = genomic RNA
caggcactgggctaaatact

SEQ ID NO: 10176 - RNA, 20 nt, Homo sapiens
  source 1..20: mol_type = genomic RNA
aggcactgggctaaatactt

SEQ ID NO: 10177 - RNA, 20 nt, Homo sapiens
  source 1..20: mol_type = genomic RNA
ggcactgggctaaatactta

SEQ ID NO: 10178 - RNA, 20 nt, Homo sapiens
  source 1..20: mol_type = genomic RNA
gcactgggctaaatacttac

SEQ ID NO: 10179 - RNA, 20 nt, Homo sapiens
  source 1..20: mol_type = genomic RNA
cactgggctaaatacttaca

SEQ ID NO: 10180 - RNA, 20 nt, Homo sapiens
  source 1..20: mol_type = genomic RNA
actgggctaaatacttacat

SEQ ID NO: 10181 - RNA, 20 nt, Homo sapiens
  source 1..20: mol_type = genomic RNA
ctgggctaaatacttacatt

SEQ ID NO: 10182 - RNA, 20 nt, Homo sapiens
  source 1..20: mol_type = genomic RNA
tgggctaaatacttacattt

SEQ ID NO: 10183 - RNA, 20 nt, Homo sapiens
  source 1..20: mol_type = genomic RNA
gggctaaatacttacattta

SEQ ID NO: 10184 - RNA, 20 nt, Homo sapiens
  source 1..20: mol_type = genomic RNA
ggctaaatacttacatttac

SEQ ID NO: 10185 - RNA, 20 nt, Homo sapiens
  source 1..20: mol_type = genomic RNA
gctaaatacttacatttaca

SEQ ID NO: 10186 - RNA, 20 nt, Homo sapiens
  source 1..20: mol_type = genomic RNA
ctaaatacttacatttacaa

SEQ ID NO: 10187 - RNA, 20 nt, Homo sapiens
  source 1..20: mol_type = genomic RNA
taaatacttacatttacaag

SEQ ID NO: 10188 - RNA, 20 nt, Homo sapiens
  source 1..20: mol_type = genomic RNA
aaatacttacatttacaaga

SEQ ID NO: 10189 - RNA, 20 nt, Homo sapiens
  source 1..20: mol_type = genomic RNA
aatacttacatttacaagaa

SEQ ID NO: 10190 - RNA, 20 nt, Homo sapiens
  source 1..20: mol_type = genomic RNA
atacttacatttacaagaat

SEQ ID NO: 10191 - RNA, 20 nt, Homo sapiens
  source 1..20: mol_type = genomic RNA
tacttacatttacaagaatc

SEQ ID NO: 10192 - RNA, 20 nt, Homo sapiens
  source 1..20: mol_type = genomic RNA
acttacatttacaagaatca

SEQ ID NO: 10193 - RNA, 20 nt, Homo sapiens
  source 1..20: mol_type = genomic RNA
cttacatttacaagaatcat

SEQ ID NO: 10194 - RNA, 20 nt, Homo sapiens
  source 1..20: mol_type = genomic RNA
ttacatttacaagaatcatt

SEQ ID NO: 10195 - RNA, 20 nt, Homo sapiens
  source 1..20: mol_type = genomic RNA
tacatttacaagaatcattc

SEQ ID NO: 10196 - RNA, 20 nt, Homo sapiens
  source 1..20: mol_type = genomic RNA
acatttacaagaatcattct

SEQ ID NO: 10197 - RNA, 20 nt, Homo sapiens
  source 1..20: mol_type = genomic RNA
catttacaagaatcattctg

SEQ ID NO: 10198 - RNA, 20 nt, Homo sapiens
  source 1..20: mol_type = genomic RNA
atttacaagaatcattctga

SEQ ID NO: 10199 - RNA, 20 nt, Homo sapiens
  source 1..20: mol_type = genomic RNA
tttacaagaatcattctgag

SEQ ID NO: 10200 - RNA, 20 nt, Homo sapiens
  source 1..20: mol_type = genomic RNA
ttacaagaatcattctgaga

SEQ ID NO: 10201 - RNA, 20 nt, Homo sapiens
  source 1..20: mol_type = genomic RNA
tacaagaatcattctgagac

SEQ ID NO: 10202 - RNA, 20 nt, Homo sapiens
  source 1..20: mol_type = genomic RNA
acaagaatcattctgagaca

SEQ ID NO: 10203 - RNA, 20 nt, Homo sapiens
  source 1..20: mol_type = genomic RNA
caagaatcattctgagacag

SEQ ID NO: 10204 - RNA, 20 nt, Homo sapiens
  source 1..20: mol_type = genomic RNA
aagaatcattctgagacaga

SEQ ID NO: 10205 - RNA, 20 nt, Homo sapiens
  source 1..20: mol_type = genomic RNA
agaatcattctgagacagat

SEQ ID NO: 10206 - RNA, 20 nt, Homo sapiens
  source 1..20: mol_type = genomic RNA
gaatcattctgagacagata

SEQ ID NO: 10207 - RNA, 20 nt, Homo sapiens
  source 1..20: mol_type = genomic RNA
aatcattctgagacagatat

SEQ ID NO: 10208 - RNA, 20 nt, Homo sapiens
  source 1..20: mol_type = genomic RNA
atcattctgagacagatatt

SEQ ID NO: 10209 - RNA, 20 nt, Homo sapiens
  source 1..20: mol_type = genomic RNA
tcattctgagacagatattc

SEQ ID NO: 10210 - RNA, 20 nt, Homo sapiens
  source 1..20: mol_type = genomic RNA
cattctgagacagatattca

SEQ ID NO: 10211 - RNA, 20 nt, Homo sapiens
  source 1..20: mol_type = genomic RNA
attctgagacagatattcaa

SEQ ID NO: 10212 - RNA, 20 nt, Homo sapiens
  source 1..20: mol_type = genomic RNA
ttctgagacagatattcaat

SEQ ID NO: 10213 - RNA, 20 nt, Homo sapiens
  source 1..20: mol_type = genomic RNA
tctgagacagatattcaatg

SEQ ID NO: 10214 - RNA, 20 nt, Homo sapiens
  source 1..20: mol_type = genomic RNA
ctgagacagatattcaatga

SEQ ID NO: 10215 - RNA, 20 nt, Homo sapiens
  source 1..20: mol_type = genomic RNA
tgagacagatattcaatgat

SEQ ID NO: 10216 - RNA, 20 nt, Homo sapiens
  source 1..20: mol_type = genomic RNA
gagacagatattcaatgata

SEQ ID NO: 10217 - RNA, 20 nt, Homo sapiens
  source 1..20: mol_type = genomic RNA
agacagatattcaatgatat

SEQ ID NO: 10218 - RNA, 20 nt, Homo sapiens
  source 1..20: mol_type = genomic RNA
gacagatattcaatgatatc

SEQ ID NO: 10219 - RNA, 20 nt, Homo sapiens
  source 1..20: mol_type = genomic RNA
acagatattcaatgatatct

SEQ ID NO: 10220 - RNA, 20 nt, Homo sapiens
  source 1..20: mol_type = genomic RNA
cagatattcaatgatatctg

SEQ ID NO: 10221 - RNA, 20 nt, Homo sapiens
  source 1..20: mol_type = genomic RNA
agatattcaatgatatctgg

SEQ ID NO: 10222 - RNA, 20 nt, Homo sapiens
  source 1..20: mol_type = genomic RNA
gatattcaatgatatctggc

SEQ ID NO: 10223 - RNA, 20 nt, Homo sapiens
  source 1..20: mol_type = genomic RNA
atattcaatgatatctggct

SEQ ID NO: 10224 - RNA, 20 nt, Homo sapiens
  source 1..20: mol_type = genomic RNA
tattcaatgatatctggctt

SEQ ID NO: 10225 - RNA, 20 nt, Homo sapiens
  source 1..20: mol_type = genomic RNA
attcaatgatatctggcttc

SEQ ID NO: 10226 - RNA, 20 nt, Homo sapiens
  source 1..20: mol_type = genomic RNA
ttcaatgatatctggcttca

SEQ ID NO: 10227 - RNA, 20 nt, Homo sapiens
  source 1..20: mol_type = genomic RNA
tcaatgatatctggcttcac

SEQ ID NO: 10228 - RNA, 20 nt, Homo sapiens
  source 1..20: mol_type = genomic RNA
caatgatatctggcttcact

SEQ ID NO: 10229 - RNA, 20 nt, Homo sapiens
  source 1..20: mol_type = genomic RNA
aatgatatctggcttcacta

SEQ ID NO: 10230 - RNA, 20 nt, Homo sapiens
  source 1..20: mol_type = genomic RNA
atgatatctggcttcactac

SEQ ID NO: 10231 - RNA, 20 nt, Homo sapiens
  source 1..20: mol_type = genomic RNA
tgatatctggcttcactact

SEQ ID NO: 10232 - RNA, 20 nt, Homo sapiens
  source 1..20: mol_type = genomic RNA
gatatctggcttcactactc

SEQ ID NO: 10233 - RNA, 20 nt, Homo sapiens
  source 1..20: mol_type = genomic RNA
atatctggcttcactactca

SEQ ID NO: 10234 - RNA, 20 nt, Homo sapiens
  source 1..20: mol_type = genomic RNA
tatctggcttcactactcag

SEQ ID NO: 10235 - RNA, 20 nt, Homo sapiens
  source 1..20: mol_type = genomic RNA
atctggcttcactactcaga

SEQ ID NO: 10236 - RNA, 20 nt, Homo sapiens
  source 1..20: mol_type = genomic RNA
tctggcttcactactcagaa

SEQ ID NO: 10237 - RNA, 20 nt, Homo sapiens
  source 1..20: mol_type = genomic RNA
ctggcttcactactcagaag

SEQ ID NO: 10238 - RNA, 20 nt, Homo sapiens
  source 1..20: mol_type = genomic RNA
tggcttcactactcagaaga

SEQ ID NO: 10239 - RNA, 20 nt, Homo sapiens
  source 1..20: mol_type = genomic RNA
ggcttcactactcagaagat

SEQ ID NO: 10240 - RNA, 20 nt, Homo sapiens
  source 1..20: mol_type = genomic RNA
gcttcactactcagaagatt

SEQ ID NO: 10241 - RNA, 20 nt, Homo sapiens
  source 1..20: mol_type = genomic RNA
cttcactactcagaagattg

SEQ ID NO: 10242 - RNA, 20 nt, Homo sapiens
  source 1..20: mol_type = genomic RNA
ttcactactcagaagattgt

SEQ ID NO: 10243 - RNA, 20 nt, Homo sapiens
  source 1..20: mol_type = genomic RNA
tcactactcagaagattgtg

SEQ ID NO: 10244 - RNA, 20 nt, Homo sapiens
  source 1..20: mol_type = genomic RNA
cactactcagaagattgtgt

SEQ ID NO: 10245 - RNA, 20 nt, Homo sapiens
  source 1..20: mol_type = genomic RNA
actactcagaagattgtgtg

SEQ ID NO: 10246 - RNA, 20 nt, Homo sapiens
  source 1..20: mol_type = genomic RNA
ctactcagaagattgtgtgt

SEQ ID NO: 10247 - RNA, 20 nt, Homo sapiens
  source 1..20: mol_type = genomic RNA
tactcagaagattgtgtgtg

SEQ ID NO: 10248 - RNA, 20 nt, Homo sapiens
  source 1..20: mol_type = genomic RNA
actcagaagattgtgtgtgt

SEQ ID NO: 10249 - RNA, 20 nt, Homo sapiens
  source 1..20: mol_type = genomic RNA
ctcagaagattgtgtgtgtg

SEQ ID NO: 10250 - RNA, 20 nt, Homo sapiens
  source 1..20: mol_type = genomic RNA
tcagaagattgtgtgtgtgt

SEQ ID NO: 10251 - RNA, 20 nt, Homo sapiens
  source 1..20: mol_type = genomic RNA
cagaagattgtgtgtgtgtt

SEQ ID NO: 10252 - RNA, 20 nt, Homo sapiens
  source 1..20: mol_type = genomic RNA
agaagattgtgtgtgtgttt

SEQ ID NO: 10253 - RNA, 20 nt, Homo sapiens
  source 1..20: mol_type = genomic RNA
gaagattgtgtgtgtgtttg

SEQ ID NO: 10254 - RNA, 20 nt, Homo sapiens
  source 1..20: mol_type = genomic RNA
aagattgtgtgtgtgtttgt

SEQ ID NO: 10255 - RNA, 20 nt, Homo sapiens
  source 1..20: mol_type = genomic RNA
agattgtgtgtgtgtttgtg

SEQ ID NO: 10256 - RNA, 20 nt, Homo sapiens
  source 1..20: mol_type = genomic RNA
gattgtgtgtgtgtttgtgt

SEQ ID NO: 10257 - RNA, 20 nt, Homo sapiens
  source 1..20: mol_type = genomic RNA
attgtgtgtgtgtttgtgtg

SEQ ID NO: 10258 - RNA, 20 nt, Homo sapiens
  source 1..20: mol_type = genomic RNA
ttgtgtgtgtgtttgtgtgt

SEQ ID NO: 10259 - RNA, 20 nt, Homo sapiens
  source 1..20: mol_type = genomic RNA
tgtgtgtgtgtttgtgtgtg

SEQ ID NO: 10260 - RNA, 20 nt, Homo sapiens
  source 1..20: mol_type = genomic RNA
gtgtgtgtgtttgtgtgtgt

SEQ ID NO: 10261 - RNA, 20 nt, Homo sapiens
  source 1..20: mol_type = genomic RNA
tgtgtgtgtttgtgtgtgtg

SEQ ID NO: 10262 - RNA, 20 nt, Homo sapiens
  source 1..20: mol_type = genomic RNA
gtgtgtgtttgtgtgtgtgt

SEQ ID NO: 10263 - RNA, 20 nt, Homo sapiens
  source 1..20: mol_type = genomic RNA
tgtgtgtttgtgtgtgtgtg

SEQ ID NO: 10264 - RNA, 20 nt, Homo sapiens
  source 1..20: mol_type = genomic RNA
gtgtgtttgtgtgtgtgtgt

SEQ ID NO: 10265 - RNA, 20 nt, Homo sapiens
  source 1..20: mol_type = genomic RNA
tgtgtttgtgtgtgtgtgtg

SEQ ID NO: 10266 - RNA, 20 nt, Homo sapiens
  source 1..20: mol_type = genomic RNA
gtgtttgtgtgtgtgtgtgt

SEQ ID NO: 10267 - RNA, 20 nt, Homo sapiens
  source 1..20: mol_type = genomic RNA
tgtttgtgtgtgtgtgtgtg

SEQ ID NO: 10268 - RNA, 20 nt, Homo sapiens
  source 1..20: mol_type = genomic RNA
gtttgtgtgtgtgtgtgtgt

SEQ ID NO: 10269 - RNA, 20 nt, Homo sapiens
  source 1..20: mol_type = genomic RNA
tttgtgtgtgtgtgtgtgtg

SEQ ID NO: 10270 - RNA, 20 nt, Homo sapiens
  source 1..20: mol_type = genomic RNA
ttgtgtgtgtgtgtgtgtgt

SEQ ID NO: 10271 - RNA, 20 nt, Homo sapiens
  source 1..20: mol_type = genomic RNA
tgtgtgtgtgtgtgtgtgtg

SEQ ID NO: 10272 - RNA, 20 nt, Homo sapiens
  source 1..20: mol_type = genomic RNA
gtgtgtgtgtgtgtgtgtgt

SEQ ID NO: 10273 - RNA, 20 nt, Homo sapiens
  source 1..20: mol_type = genomic RNA
tgtgtgtgtgtgtgtgtgta

SEQ ID NO: 10274 - RNA, 20 nt, Homo sapiens
  source 1..20: mol_type = genomic RNA
gtgtgtgtgtgtgtgtgtat

SEQ ID NO: 10275 - RNA, 20 nt, Homo sapiens
  source 1..20: mol_type = genomic RNA
tgtgtgtgtgtgtgtgtatt

SEQ ID NO: 10276 - RNA, 20 nt, Homo sapiens
  source 1..20: mol_type = genomic RNA
gtgtgtgtgtgtgtgtattt

SEQ ID NO: 10277 - RNA, 20 nt, Homo sapiens
  source 1..20: mol_type = genomic RNA
tgtgtgtgtgtgtgtatttc

SEQ ID NO: 10278 - RNA, 20 nt, Homo sapiens
  source 1..20: mol_type = genomic RNA
gtgtgtgtgtgtgtatttca

SEQ ID NO: 10279 - RNA, 20 nt, Homo sapiens
  source 1..20: mol_type = genomic RNA
tgtgtgtgtgtgtatttcac

SEQ ID NO: 10280 - RNA, 20 nt, Homo sapiens
  source 1..20: mol_type = genomic RNA
gtgtgtgtgtgtatttcact

SEQ ID NO: 10281 - RNA, 20 nt, Homo sapiens
  source 1..20: mol_type = genomic RNA
tgtgtgtgtgtatttcactt

SEQ ID NO: 10282 - RNA, 20 nt, Homo sapiens
  source 1..20: mol_type = genomic RNA
gtgtgtgtgtatttcacttt

SEQ ID NO: 10283 - RNA, 20 nt, Homo sapiens
  source 1..20: mol_type = genomic RNA
tgtgtgtgtatttcactttt

SEQ ID NO: 10284 - RNA, 20 nt, Homo sapiens
  source 1..20: mol_type = genomic RNA
gtgtgtgtatttcacttttt

SEQ ID NO: 10285 - RNA, 20 nt, Homo sapiens
  source 1..20: mol_type = genomic RNA
tgtgtgtatttcactttttg

SEQ ID NO: 10286 - RNA, 20 nt, Homo sapiens
  source 1..20: mol_type = genomic RNA
gtgtgtatttcactttttgt

SEQ ID NO: 10287 - RNA, 20 nt, Homo sapiens
  source 1..20: mol_type = genomic RNA
tgtgtatttcactttttgtt

SEQ ID NO: 10288 - RNA, 20 nt, Homo sapiens
  source 1..20: mol_type = genomic RNA
gtgtatttcactttttgtta

SEQ ID NO: 10289 - RNA, 20 nt, Homo sapiens
  source 1..20: mol_type = genomic RNA
tgtatttcactttttgttat

SEQ ID NO: 10290 - RNA, 20 nt, Homo sapiens
  source 1..20: mol_type = genomic RNA
gtatttcactttttgttatt

SEQ ID NO: 10291 - RNA, 20 nt, Homo sapiens
  source 1..20: mol_type = genomic RNA
tatttcactttttgttattg

SEQ ID NO: 10292 - RNA, 20 nt, Homo sapiens
  source 1..20: mol_type = genomic RNA
atttcactttttgttattga

SEQ ID NO: 10293 - RNA, 20 nt, Homo sapiens
  source 1..20: mol_type = genomic RNA
tttcactttttgttattgac

SEQ ID NO: 10294 - RNA, 20 nt, Homo sapiens
  source 1..20: mol_type = genomic RNA
ttcactttttgttattgacc

SEQ ID NO: 10295 - RNA, 20 nt, Homo sapiens
  source 1..20: mol_type = genomic RNA
tcactttttgttattgacca

SEQ ID NO: 10296 - RNA, 20 nt, Homo sapiens
  source 1..20: mol_type = genomic RNA
cactttttgttattgaccat

SEQ ID NO: 10297 - RNA, 20 nt, Homo sapiens
  source 1..20: mol_type = genomic RNA
actttttgttattgaccatg

SEQ ID NO: 10298 - RNA, 20 nt, Homo sapiens
  source 1..20: mol_type = genomic RNA
ctttttgttattgaccatgt

SEQ ID NO: 10299 - RNA, 20 nt, Homo sapiens
  source 1..20: mol_type = genomic RNA
tttttgttattgaccatgtt

SEQ ID NO: 10300 - RNA, 20 nt, Homo sapiens
  source 1..20: mol_type = genomic RNA
ttttgttattgaccatgttc

SEQ ID NO: 10301 - RNA, 20 nt, Homo sapiens
  source 1..20: mol_type = genomic RNA
tttgttattgaccatgttct

SEQ ID NO: 10302 - RNA, 20 nt, Homo sapiens
  source 1..20: mol_type = genomic RNA
ttgttattgaccatgttctg

SEQ ID NO: 10303 - RNA, 20 nt, Homo sapiens
  source 1..20: mol_type = genomic RNA
tgttattgaccatgttctgc

SEQ ID NO: 10304 - RNA, 20 nt, Homo sapiens
  source 1..20: mol_type = genomic RNA
gttattgaccatgttctgca

SEQ ID NO: 10305 - RNA, 20 nt, Homo sapiens
  source 1..20: mol_type = genomic RNA
ttattgaccatgttctgcaa

SEQ ID NO: 10306 - RNA, 20 nt, Homo sapiens
  source 1..20: mol_type = genomic RNA
tattgaccatgttctgcaaa

SEQ ID NO: 10307 - RNA, 20 nt, Homo sapiens
  source 1..20: mol_type = genomic RNA
attgaccatgttctgcaaaa

SEQ ID NO: 10308 - RNA, 20 nt, Homo sapiens
  source 1..20: mol_type = genomic RNA
ttgaccatgttctgcaaaat

SEQ ID NO: 10309 - RNA, 20 nt, Homo sapiens
  source 1..20: mol_type = genomic RNA
tgaccatgttctgcaaaatt

SEQ ID NO: 10310 - RNA, 20 nt, Homo sapiens
  source 1..20: mol_type = genomic RNA
gaccatgttctgcaaaattg

SEQ ID NO: 10311 - RNA, 20 nt, Homo sapiens
  source 1..20: mol_type = genomic RNA
accatgttctgcaaaattgc

SEQ ID NO: 10312 - RNA, 20 nt, Homo sapiens
  source 1..20: mol_type = genomic RNA
ccatgttctgcaaaattgca

SEQ ID NO: 10313 - RNA, 20 nt, Homo sapiens
  source 1..20: mol_type = genomic RNA
catgttctgcaaaattgcag

SEQ ID NO: 10314 - RNA, 20 nt, Homo sapiens
  source 1..20: mol_type = genomic RNA
atgttctgcaaaattgcagt

SEQ ID NO: 10315 - RNA, 20 nt, Homo sapiens
  source 1..20: mol_type = genomic RNA
tgttctgcaaaattgcagtt

SEQ ID NO: 10316 - RNA, 20 nt, Homo sapiens
  source 1..20: mol_type = genomic RNA
gttctgcaaaattgcagtta

SEQ ID NO: 10317 - RNA, 20 nt, Homo sapiens
  source 1..20: mol_type = genomic RNA
ttctgcaaaattgcagttac

SEQ ID NO: 10318 - RNA, 20 nt, Homo sapiens
  source 1..20: mol_type = genomic RNA
tctgcaaaattgcagttact

SEQ ID NO: 10319 - RNA, 20 nt, Homo sapiens
  source 1..20: mol_type = genomic RNA
ctgcaaaattgcagttactc

SEQ ID NO: 10320 - RNA, 20 nt, Homo sapiens
  source 1..20: mol_type = genomic RNA
tgcaaaattgcagttactca

SEQ ID NO: 10321 - RNA, 20 nt, Homo sapiens
  source 1..20: mol_type = genomic RNA
gcaaaattgcagttactcag

SEQ ID NO: 10322 - RNA, 20 nt, Homo sapiens
  source 1..20: mol_type = genomic RNA
caaaattgcagttactcagt

SEQ ID NO: 10323 - RNA, 20 nt, Homo sapiens
  source 1..20: mol_type = genomic RNA
aaaattgcagttactcagtg

SEQ ID NO: 10324 - RNA, 20 nt, Homo sapiens
  source 1..20: mol_type = genomic RNA
aaattgcagttactcagtga

SEQ ID NO: 10325 - RNA, 20 nt, Homo sapiens
  source 1..20: mol_type = genomic RNA
aattgcagttactcagtgag

SEQ ID NO: 10326 - RNA, 20 nt, Homo sapiens
  source 1..20: mol_type = genomic RNA
attgcagttactcagtgagt

SEQ ID NO: 10327 - RNA, 20 nt, Homo sapiens
  source 1..20: mol_type = genomic RNA
ttgcagttactcagtgagtg

SEQ ID NO: 10328 - RNA, 20 nt, Homo sapiens
  source 1..20: mol_type = genomic RNA
tgcagttactcagtgagtga

SEQ ID NO: 10329 - RNA, 20 nt, Homo sapiens
  source 1..20: mol_type = genomic RNA
gcagttactcagtgagtgat

SEQ ID NO: 10330 - RNA, 20 nt, Homo sapiens
  source 1..20: mol_type = genomic RNA
cagttactcagtgagtgata

SEQ ID NO: 10331 - RNA, 20 nt, Homo sapiens
  source 1..20: mol_type = genomic RNA
agttactcagtgagtgatat

SEQ ID NO: 10332 - RNA, 20 nt, Homo sapiens
  source 1..20: mol_type = genomic RNA
gttactcagtgagtgatatc

SEQ ID NO: 10333 - RNA, 20 nt, Homo sapiens
  source 1..20: mol_type = genomic RNA
ttactcagtgagtgatatcc

SEQ ID NO: 10334 - RNA, 20 nt, Homo sapiens
  source 1..20: mol_type = genomic RNA
tactcagtgagtgatatccg

SEQ ID NO: 10335 - RNA, 20 nt, Homo sapiens
  source 1..20: mol_type = genomic RNA
actcagtgagtgatatccga

SEQ ID NO: 10336 - RNA, 20 nt, Homo sapiens
  source 1..20: mol_type = genomic RNA
ctcagtgagtgatatccgaa

SEQ ID NO: 10337 - RNA, 20 nt, Homo sapiens
  source 1..20: mol_type = genomic RNA
tcagtgagtgatatccgaaa

SEQ ID NO: 10338 - RNA, 20 nt, Homo sapiens
  source 1..20: mol_type = genomic RNA
cagtgagtgatatccgaaaa

SEQ ID NO: 10339 - RNA, 20 nt, Homo sapiens
  source 1..20: mol_type = genomic RNA
agtgagtgatatccgaaaaa

SEQ ID NO: 10340 - RNA, 20 nt, Homo sapiens
  source 1..20: mol_type = genomic RNA
gtgagtgatatccgaaaaag

SEQ ID NO: 10341 - RNA, 20 nt, Homo sapiens
  source 1..20: mol_type = genomic RNA
tgagtgatatccgaaaaagt

SEQ ID NO: 10342 - RNA, 20 nt, Homo sapiens
  source 1..20: mol_type = genomic RNA
gagtgatatccgaaaaagta

SEQ ID NO: 10343 - RNA, 20 nt, Homo sapiens
  source 1..20: mol_type = genomic RNA
agtgatatccgaaaaagtaa

SEQ ID NO: 10344 - RNA, 20 nt, Homo sapiens
  source 1..20: mol_type = genomic RNA
gtgatatccgaaaaagtaaa

SEQ ID NO: 10345 - RNA, 20 nt, Homo sapiens
  source 1..20: mol_type = genomic RNA
tgatatccgaaaaagtaaac

SEQ ID NO: 10346 - RNA, 20 nt, Homo sapiens
  source 1..20: mol_type = genomic RNA
gatatccgaaaaagtaaacg

SEQ ID NO: 10347 - RNA, 20 nt, Homo sapiens
  source 1..20: mol_type = genomic RNA
atatccgaaaaagtaaacgt

SEQ ID NO: 10348 - RNA, 20 nt, Homo sapiens
  source 1..20: mol_type = genomic RNA
tatccgaaaaagtaaacgtt

SEQ ID NO: 10349 - RNA, 20 nt, Homo sapiens
  source 1..20: mol_type = genomic RNA
atccgaaaaagtaaacgttt

SEQ ID NO: 10350 - RNA, 20 nt, Homo sapiens
  source 1..20: mol_type = genomic RNA
tccgaaaaagtaaacgttta

SEQ ID NO: 10351 - RNA, 20 nt, Homo sapiens
  source 1..20: mol_type = genomic RNA
ccgaaaaagtaaacgtttat

SEQ ID NO: 10352 - RNA, 20 nt, Homo sapiens
  source 1..20: mol_type = genomic RNA
cgaaaaagtaaacgtttatg

SEQ ID NO: 10353 - RNA, 20 nt, Homo sapiens
  source 1..20: mol_type = genomic RNA
gaaaaagtaaacgtttatga

SEQ ID NO: 10354 - RNA, 20 nt, Homo sapiens
  source 1..20: mol_type = genomic RNA
aaaaagtaaacgtttatgac

SEQ ID NO: 10355 - RNA, 20 nt, Homo sapiens
  source 1..20: mol_type = genomic RNA
aaaagtaaacgtttatgact

SEQ ID NO: 10356 - RNA, 20 nt, Homo sapiens
  source 1..20: mol_type = genomic RNA
aaagtaaacgtttatgacta

SEQ ID NO: 10357 - RNA, 20 nt, Homo sapiens
  source 1..20: mol_type = genomic RNA
aagtaaacgtttatgactat

SEQ ID NO: 10358 - RNA, 20 nt, Homo sapiens
  source 1..20: mol_type = genomic RNA
agtaaacgtttatgactata

SEQ ID NO: 10359 - RNA, 20 nt, Homo sapiens
  source 1..20: mol_type = genomic RNA
gtaaacgtttatgactatag

SEQ ID NO: 10360 - RNA, 20 nt, Homo sapiens
  source 1..20: mol_type = genomic RNA
taaacgtttatgactatagg

SEQ ID NO: 10361 - RNA, 20 nt, Homo sapiens
  source 1..20: mol_type = genomic RNA
aaacgtttatgactataggt

SEQ ID NO: 10362 - RNA, 20 nt, Homo sapiens
  source 1..20: mol_type = genomic RNA
aacgtttatgactataggta

SEQ ID NO: 10363 - RNA, 20 nt, Homo sapiens
  source 1..20: mol_type = genomic RNA
acgtttatgactataggtaa

SEQ ID NO: 10364 - RNA, 20 nt, Homo sapiens
  source 1..20: mol_type = genomic RNA
cgtttatgactataggtaat

SEQ ID NO: 10365 - RNA, 20 nt, Homo sapiens
  source 1..20: mol_type = genomic RNA
gtttatgactataggtaata

SEQ ID NO: 10366 - RNA, 20 nt, Homo sapiens
  source 1..20: mol_type = genomic RNA
tttatgactataggtaatat

SEQ ID NO: 10367 - RNA, 20 nt, Homo sapiens
  source 1..20: mol_type = genomic RNA
ttatgactataggtaatatt

SEQ ID NO: 10368 - RNA, 20 nt, Homo sapiens
  source 1..20: mol_type = genomic RNA
tatgactataggtaatattt

SEQ ID NO: 10369 - RNA, 20 nt, Homo sapiens
  source 1..20: mol_type = genomic RNA
atgactataggtaatattta

SEQ ID NO: 10370 - RNA, 20 nt, Homo sapiens
  source 1..20: mol_type = genomic RNA
tgactataggtaatatttaa

SEQ ID NO: 10371 - RNA, 20 nt, Homo sapiens
  source 1..20: mol_type = genomic RNA
gactataggtaatatttaag

SEQ ID NO: 10372 - RNA, 20 nt, Homo sapiens
  source 1..20: mol_type = genomic RNA
actataggtaatatttaaga

SEQ ID NO: 10373 - RNA, 20 nt, Homo sapiens
  source 1..20: mol_type = genomic RNA
ctataggtaatatttaagaa

SEQ ID NO: 10374 - RNA, 20 nt, Homo sapiens
  source 1..20: mol_type = genomic RNA
tataggtaatatttaagaaa

SEQ ID NO: 10375 - RNA, 20 nt, Homo sapiens
  source 1..20: mol_type = genomic RNA
ataggtaatatttaagaaaa

SEQ ID NO: 10376 - RNA, 20 nt, Homo sapiens
  source 1..20: mol_type = genomic RNA
taggtaatatttaagaaaat

SEQ ID NO: 10377 - RNA, 20 nt, Homo sapiens
  source 1..20: mol_type = genomic RNA
aggtaatatttaagaaaatg

SEQ ID NO: 10378 - RNA, 20 nt, Homo sapiens
  source 1..20: mol_type = genomic RNA
ggtaatatttaagaaaatgc

SEQ ID NO: 10379 - RNA, 20 nt, Homo sapiens
  source 1..20: mol_type = genomic RNA
gtaatatttaagaaaatgca

SEQ ID NO: 10380 - RNA, 20 nt, Homo sapiens
  source 1..20: mol_type = genomic RNA
taatatttaagaaaatgcat

SEQ ID NO: 10381 - RNA, 20 nt, Homo sapiens
  source 1..20: mol_type = genomic RNA
aatatttaagaaaatgcatg

SEQ ID NO: 10382 - RNA, 20 nt, Homo sapiens
  source 1..20: mol_type = genomic RNA
atatttaagaaaatgcatgg

SEQ ID NO: 10383 - RNA, 20 nt, Homo sapiens
  source 1..20: mol_type = genomic RNA
tatttaagaaaatgcatggt

SEQ ID NO: 10384 - RNA, 20 nt, Homo sapiens
  source 1..20: mol_type = genomic RNA
atttaagaaaatgcatggtt

SEQ ID NO: 10385 - RNA, 20 nt, Homo sapiens
  source 1..20: mol_type = genomic RNA
tttaagaaaatgcatggttc

SEQ ID NO: 10386 - RNA, 20 nt, Homo sapiens
  source 1..20: mol_type = genomic RNA
ttaagaaaatgcatggttca

SEQ ID NO: 10387 - RNA, 20 nt, Homo sapiens
  source 1..20: mol_type = genomic RNA
taagaaaatgcatggttcat

SEQ ID NO: 10388 - RNA, 20 nt, Homo sapiens
  source 1..20: mol_type = genomic RNA
aagaaaatgcatggttcatt

SEQ ID NO: 10389 - RNA, 20 nt, Homo sapiens
  source 1..20: mol_type = genomic RNA
agaaaatgcatggttcattt

SEQ ID NO: 10390 - RNA, 20 nt, Homo sapiens
  source 1..20: mol_type = genomic RNA
gaaaatgcatggttcatttt

SEQ ID NO: 10391 - RNA, 20 nt, Homo sapiens
  source 1..20: mol_type = genomic RNA
aaaatgcatggttcattttt

SEQ ID NO: 10392 - RNA, 20 nt, Homo sapiens
  source 1..20: mol_type = genomic RNA
aaatgcatggttcattttta

SEQ ID NO: 10393 - RNA, 20 nt, Homo sapiens
  source 1..20: mol_type = genomic RNA
aatgcatggttcatttttaa

SEQ ID NO: 10394 - RNA, 20 nt, Homo sapiens
  source 1..20: mol_type = genomic RNA
atgcatggttcatttttaag

SEQ ID NO: 10395 - RNA, 20 nt, Homo sapiens
  source 1..20: mol_type = genomic RNA
tgcatggttcatttttaagt

SEQ ID NO: 10396 - RNA, 20 nt, Homo sapiens
  source 1..20: mol_type = genomic RNA
gcatggttcatttttaagtt

SEQ ID NO: 10397 - RNA, 20 nt, Homo sapiens
  source 1..20: mol_type = genomic RNA
catggttcatttttaagttt

SEQ ID NO: 10398 - RNA, 20 nt, Homo sapiens
  source 1..20: mol_type = genomic RNA
atggttcatttttaagtttg

SEQ ID NO: 10399 - RNA, 20 nt, Homo sapiens
  source 1..20: mol_type = genomic RNA
tggttcatttttaagtttgg

SEQ ID NO: 10400 - RNA, 20 nt, Homo sapiens
  source 1..20: mol_type = genomic RNA
ggttcatttttaagtttgga

SEQ ID NO: 10401 - RNA, 20 nt, Homo sapiens
  source 1..20: mol_type = genomic RNA
gttcatttttaagtttggaa

SEQ ID NO: 10402 - RNA, 20 nt, Homo sapiens
  source 1..20: mol_type = genomic RNA
ttcatttttaagtttggaat

SEQ ID NO: 10403 - RNA, 20 nt, Homo sapiens
  source 1..20: mol_type = genomic RNA
tcatttttaagtttggaatt

SEQ ID NO: 10404 - RNA, 20 nt, Homo sapiens
  source 1..20: mol_type = genomic RNA
catttttaagtttggaattt

SEQ ID NO: 10405 - RNA, 20 nt, Homo sapiens
  source 1..20: mol_type = genomic RNA
atttttaagtttggaatttt

SEQ ID NO: 10406 - RNA, 20 nt, Homo sapiens
  source 1..20: mol_type = genomic RNA
tttttaagtttggaattttt

SEQ ID NO: 10407 - RNA, 20 nt, Homo sapiens
  source 1..20: mol_type = genomic RNA
ttttaagtttggaattttta

SEQ ID NO: 10408 - RNA, 20 nt, Homo sapiens
  source 1..20: mol_type = genomic RNA
tttaagtttggaatttttat

SEQ ID NO: 10409 - RNA, 20 nt, Homo sapiens
  source 1..20: mol_type = genomic RNA
ttaagtttggaatttttatc

SEQ ID NO: 10410 - RNA, 20 nt, Homo sapiens
  source 1..20: mol_type = genomic RNA
taagtttggaatttttatct

SEQ ID NO: 10411 - RNA, 20 nt, Homo sapiens
  source 1..20: mol_type = genomic RNA
aagtttggaatttttatcta

SEQ ID NO: 10412 - RNA, 20 nt, Homo sapiens
  source 1..20: mol_type = genomic RNA
agtttggaatttttatctat

SEQ ID NO: 10413 - RNA, 20 nt, Homo sapiens
  source 1..20: mol_type = genomic RNA
gtttggaatttttatctata

SEQ ID NO: 10414 - RNA, 20 nt, Homo sapiens
  source 1..20: mol_type = genomic RNA
tttggaatttttatctatat

SEQ ID NO: 10415 - RNA, 20 nt, Homo sapiens
  source 1..20: mol_type = genomic RNA
ttggaatttttatctatatt

SEQ ID NO: 10416 - RNA, 20 nt, Homo sapiens
  source 1..20: mol_type = genomic RNA
tggaatttttatctatattt

SEQ ID NO: 10417 - RNA, 20 nt, Homo sapiens
  source 1..20: mol_type = genomic RNA
ggaatttttatctatatttc

SEQ ID NO: 10418 - RNA, 20 nt, Homo sapiens
  source 1..20: mol_type = genomic RNA
gaatttttatctatatttct

SEQ ID NO: 10419 - RNA, 20 nt, Homo sapiens
  source 1..20: mol_type = genomic RNA
aatttttatctatatttctc

SEQ ID NO: 10420 - RNA, 20 nt, Homo sapiens
  source 1..20: mol_type = genomic RNA
atttttatctatatttctca

SEQ ID NO: 10421 - RNA, 20 nt, Homo sapiens
  source 1..20: mol_type = genomic RNA
tttttatctatatttctcac

SEQ ID NO: 10422 - RNA, 20 nt, Homo sapiens
  source 1..20: mol_type = genomic RNA
ttttatctatatttctcaca

SEQ ID NO: 10423 - RNA, 20 nt, Homo sapiens
  source 1..20: mol_type = genomic RNA
tttatctatatttctcacag

SEQ ID NO: 10424 - RNA, 20 nt, Homo sapiens
  source 1..20: mol_type = genomic RNA
ttatctatatttctcacaga

SEQ ID NO: 10425 - RNA, 20 nt, Homo sapiens
  source 1..20: mol_type = genomic RNA
tatctatatttctcacagat

SEQ ID NO: 10426 - RNA, 20 nt, Homo sapiens
  source 1..20: mol_type = genomic RNA
atctatatttctcacagatg

SEQ ID NO: 10427 - RNA, 20 nt, Homo sapiens
  source 1..20: mol_type = genomic RNA
tctatatttctcacagatgt

SEQ ID NO: 10428 - RNA, 20 nt, Homo sapiens
  source 1..20: mol_type = genomic RNA
ctatatttctcacagatgtg

SEQ ID NO: 10429 - RNA, 20 nt, Homo sapiens
  source 1..20: mol_type = genomic RNA
tatatttctcacagatgtgc

SEQ ID NO: 10430 - RNA, 20 nt, Homo sapiens
  source 1..20: mol_type = genomic RNA
atatttctcacagatgtgca

SEQ ID NO: 10431 - RNA, 20 nt, Homo sapiens
  source 1..20: mol_type = genomic RNA
tatttctcacagatgtgcag

SEQ ID NO: 10432 - RNA, 20 nt, Homo sapiens
  source 1..20: mol_type = genomic RNA
atttctcacagatgtgcagt

SEQ ID NO: 10433 - RNA, 20 nt, Homo sapiens
  source 1..20: mol_type = genomic RNA
tttctcacagatgtgcagtg

SEQ ID NO: 10434 - RNA, 20 nt, Homo sapiens
  source 1..20: mol_type = genomic RNA
ttctcacagatgtgcagtgc

SEQ ID NO: 10435 - RNA, 20 nt, Homo sapiens
  source 1..20: mol_type = genomic RNA
tctcacagatgtgcagtgca

SEQ ID NO: 10436 - RNA, 20 nt, Homo sapiens
  source 1..20: mol_type = genomic RNA
ctcacagatgtgcagtgcac

SEQ ID NO: 10437 - RNA, 20 nt, Homo sapiens
  source 1..20: mol_type = genomic RNA
tcacagatgtgcagtgcaca

SEQ ID NO: 10438 - RNA, 20 nt, Homo sapiens
  source 1..20: mol_type = genomic RNA
cacagatgtgcagtgcacat

SEQ ID NO: 10439 - RNA, 20 nt, Homo sapiens
  source 1..20: mol_type = genomic RNA
acagatgtgcagtgcacatg

SEQ ID NO: 10440 - RNA, 20 nt, Homo sapiens
  source 1..20: mol_type = genomic RNA
cagatgtgcagtgcacatgc

SEQ ID NO: 10441 - RNA, 20 nt, Homo sapiens
  source 1..20: mol_type = genomic RNA
agatgtgcagtgcacatgca

SEQ ID NO: 10442 - RNA, 20 nt, Homo sapiens
  source 1..20: mol_type = genomic RNA
gatgtgcagtgcacatgcag

SEQ ID NO: 10443 - RNA, 20 nt, Homo sapiens
  source 1..20: mol_type = genomic RNA
atgtgcagtgcacatgcagg

SEQ ID NO: 10444 - RNA, 20 nt, Homo sapiens
  source 1..20: mol_type = genomic RNA
tgtgcagtgcacatgcaggc

SEQ ID NO: 10445 - RNA, 20 nt, Homo sapiens
  source 1..20: mol_type = genomic RNA
gtgcagtgcacatgcaggcc

SEQ ID NO: 10446 - RNA, 20 nt, Homo sapiens
  source 1..20: mol_type = genomic RNA
tgcagtgcacatgcaggcct

SEQ ID NO: 10447 - RNA, 20 nt, Homo sapiens
  source 1..20: mol_type = genomic RNA
gcagtgcacatgcaggccta

SEQ ID NO: 10448 - RNA, 20 nt, Homo sapiens
  source 1..20: mol_type = genomic RNA
cagtgcacatgcaggcctaa

SEQ ID NO: 10449 - RNA, 20 nt, Homo sapiens
  source 1..20: mol_type = genomic RNA
agtgcacatgcaggcctaag

SEQ ID NO: 10450 - RNA, 20 nt, Homo sapiens
  source 1..20: mol_type = genomic RNA
gtgcacatgcaggcctaagt

SEQ ID NO: 10451 - RNA, 20 nt, Homo sapiens
  source 1..20: mol_type = genomic RNA
tgcacatgcaggcctaagta

SEQ ID NO: 10452 - RNA, 20 nt, Homo sapiens
  source 1..20: mol_type = genomic RNA
gcacatgcaggcctaagtat

SEQ ID NO: 10453 - RNA, 20 nt, Homo sapiens
  source 1..20: mol_type = genomic RNA
cacatgcaggcctaagtata

SEQ ID NO: 10454 - RNA, 20 nt, Homo sapiens
  source 1..20: mol_type = genomic RNA
acatgcaggcctaagtatat

SEQ ID NO: 10455 - RNA, 20 nt, Homo sapiens
  source 1..20: mol_type = genomic RNA
catgcaggcctaagtatatg

SEQ ID NO: 10456 - RNA, 20 nt, Homo sapiens
  source 1..20: mol_type = genomic RNA
atgcaggcctaagtatatgt

SEQ ID NO: 10457 - RNA, 20 nt, Homo sapiens
  source 1..20: mol_type = genomic RNA
tgcaggcctaagtatatgtt

SEQ ID NO: 10458 - RNA, 20 nt, Homo sapiens
  source 1..20: mol_type = genomic RNA
gcaggcctaagtatatgttg

SEQ ID NO: 10459 - RNA, 20 nt, Homo sapiens
  source 1..20: mol_type = genomic RNA
caggcctaagtatatgttgt

SEQ ID NO: 10460 - RNA, 20 nt, Homo sapiens
  source 1..20: mol_type = genomic RNA
aggcctaagtatatgttgtg

SEQ ID NO: 10461 - RNA, 20 nt, Homo sapiens
  source 1..20: mol_type = genomic RNA
ggcctaagtatatgttgtgt

SEQ ID NO: 10462 - RNA, 20 nt, Homo sapiens
  source 1..20: mol_type = genomic RNA
gcctaagtatatgttgtgtg

SEQ ID NO: 10463 - RNA, 20 nt, Homo sapiens
  source 1..20: mol_type = genomic RNA
cctaagtatatgttgtgtgt

SEQ ID NO: 10464 - RNA, 20 nt, Homo sapiens
  source 1..20: mol_type = genomic RNA
ctaagtatatgttgtgtgtg

SEQ ID NO: 10465 - RNA, 20 nt, Homo sapiens
  source 1..20: mol_type = genomic RNA
taagtatatgttgtgtgtgt

SEQ ID NO: 10466 - RNA, 20 nt, Homo sapiens
  source 1..20: mol_type = genomic RNA
aagtatatgttgtgtgtgtt

SEQ ID NO: 10467 - RNA, 20 nt, Homo sapiens
  source 1..20: mol_type = genomic RNA
agtatatgttgtgtgtgttg

SEQ ID NO: 10468 - RNA, 20 nt, Homo sapiens
  source 1..20: mol_type = genomic RNA
gtatatgttgtgtgtgttgt

SEQ ID NO: 10469 - RNA, 20 nt, Homo sapiens
  source 1..20: mol_type = genomic RNA
tatatgttgtgtgtgttgtt

SEQ ID NO: 10470 - RNA, 20 nt, Homo sapiens
  source 1..20: mol_type = genomic RNA
atatgttgtgtgtgttgttt

SEQ ID NO: 10471 - RNA, 20 nt, Homo sapiens
  source 1..20: mol_type = genomic RNA
tatgttgtgtgtgttgtttg

SEQ ID NO: 10472 - RNA, 20 nt, Homo sapiens
  source 1..20: mol_type = genomic RNA
atgttgtgtgtgttgtttgt

SEQ ID NO: 10473 - RNA, 20 nt, Homo sapiens
  source 1..20: mol_type = genomic RNA
tgttgtgtgtgttgtttgtc

SEQ ID NO: 10474 - RNA, 20 nt, Homo sapiens
  source 1..20: mol_type = genomic RNA
gttgtgtgtgttgtttgtct

SEQ ID NO: 10475 - RNA, 20 nt, Homo sapiens
  source 1..20: mol_type = genomic RNA
ttgtgtgtgttgtttgtctt

SEQ ID NO: 10476 - RNA, 20 nt, Homo sapiens
  source 1..20: mol_type = genomic RNA
tgtgtgtgttgtttgtcttt

SEQ ID NO: 10477 - RNA, 20 nt, Homo sapiens
  source 1..20: mol_type = genomic RNA
gtgtgtgttgtttgtctttg

SEQ ID NO: 10478 - RNA, 20 nt, Homo sapiens
  source 1..20: mol_type = genomic RNA
tgtgtgttgtttgtctttga

SEQ ID NO: 10479 - RNA, 20 nt, Homo sapiens
  source 1..20: mol_type = genomic RNA
gtgtgttgtttgtctttgat

SEQ ID NO: 10480 - RNA, 20 nt, Homo sapiens
  source 1..20: mol_type = genomic RNA
tgtgttgtttgtctttgatg

SEQ ID NO: 10481 - RNA, 20 nt, Homo sapiens
  source 1..20: mol_type = genomic RNA
gtgttgtttgtctttgatgt

SEQ ID NO: 10482 - RNA, 20 nt, Homo sapiens
  source 1..20: mol_type = genomic RNA
tgttgtttgtctttgatgtc

SEQ ID NO: 10483 - RNA, 20 nt, Homo sapiens
  source 1..20: mol_type = genomic RNA
gttgtttgtctttgatgtca

SEQ ID NO: 10484 - RNA, 20 nt, Homo sapiens
  source 1..20: mol_type = genomic RNA
ttgtttgtctttgatgtcat

SEQ ID NO: 10485 - RNA, 20 nt, Homo sapiens
  source 1..20: mol_type = genomic RNA
tgtttgtctttgatgtcatg

SEQ ID NO: 10486 - RNA, 20 nt, Homo sapiens
  source 1..20: mol_type = genomic RNA
gtttgtctttgatgtcatgg

SEQ ID NO: 10487 - RNA, 20 nt, Homo sapiens
  source 1..20: mol_type = genomic RNA
tttgtctttgatgtcatggt

SEQ ID NO: 10488 - RNA, 20 nt, Homo sapiens
  source 1..20: mol_type = genomic RNA
ttgtctttgatgtcatggtc

SEQ ID NO: 10489 - RNA, 20 nt, Homo sapiens
  source 1..20: mol_type = genomic RNA
tgtctttgatgtcatggtcc

SEQ ID NO: 10490 - RNA, 20 nt, Homo sapiens
  source 1..20: mol_type = genomic RNA
gtctttgatgtcatggtccc

SEQ ID NO: 10491 - RNA, 20 nt, Homo sapiens
  source 1..20: mol_type = genomic RNA
tctttgatgtcatggtcccc

SEQ ID NO: 10492 - RNA, 20 nt, Homo sapiens
  source 1..20: mol_type = genomic RNA
ctttgatgtcatggtcccct

SEQ ID NO: 10493 - RNA, 20 nt, Homo sapiens
  source 1..20: mol_type = genomic RNA
tttgatgtcatggtcccctc

SEQ ID NO: 10494 - RNA, 20 nt, Homo sapiens
  source 1..20: mol_type = genomic RNA
ttgatgtcatggtcccctct

SEQ ID NO: 10495 - RNA, 20 nt, Homo sapiens
  source 1..20: mol_type = genomic RNA
tgatgtcatggtcccctctc

SEQ ID NO: 10496 - RNA, 20 nt, Homo sapiens
  source 1..20: mol_type = genomic RNA
gatgtcatggtcccctctct

SEQ ID NO: 10497 - RNA, 20 nt, Homo sapiens
  source 1..20: mol_type = genomic RNA
atgtcatggtcccctctctt

SEQ ID NO: 10498 - RNA, 20 nt, Homo sapiens
  source 1..20: mol_type = genomic RNA
tgtcatggtcccctctctta

SEQ ID NO: 10499 - RNA, 20 nt, Homo sapiens
  source 1..20: mol_type = genomic RNA
gtcatggtcccctctcttag

SEQ ID NO: 10500 - RNA, 20 nt, Homo sapiens
  source 1..20: mol_type = genomic RNA
tcatggtcccctctcttagg

SEQ ID NO: 10501 - RNA, 20 nt, Homo sapiens
  source 1..20: mol_type = genomic RNA
catggtcccctctcttaggt

SEQ ID NO: 10502 - RNA, 20 nt, Homo sapiens
  source 1..20: mol_type = genomic RNA
atggtcccctctcttaggtg

SEQ ID NO: 10503 - RNA, 20 nt, Homo sapiens
  source 1..20: mol_type = genomic RNA
tggtcccctctcttaggtgc

SEQ ID NO: 10504 - RNA, 20 nt, Homo sapiens
  source 1..20: mol_type = genomic RNA
ggtcccctctcttaggtgct

SEQ ID NO: 10505 - RNA, 20 nt, Homo sapiens
  source 1..20: mol_type = genomic RNA
gtcccctctcttaggtgctc

SEQ ID NO: 10506 - RNA, 20 nt, Homo sapiens
  source 1..20: mol_type = genomic RNA
tcccctctcttaggtgctca

SEQ ID NO: 10507 - RNA, 20 nt, Homo sapiens
  source 1..20: mol_type = genomic RNA
cccctctcttaggtgctcac

SEQ ID NO: 10508 - RNA, 20 nt, Homo sapiens
  source 1..20: mol_type = genomic RNA
ccctctcttaggtgctcact

SEQ ID NO: 10509 - RNA, 20 nt, Homo sapiens
  source 1..20: mol_type = genomic RNA
cctctcttaggtgctcactc

SEQ ID NO: 10510 - RNA, 20 nt, Homo sapiens
  source 1..20: mol_type = genomic RNA
ctctcttaggtgctcactcg

SEQ ID NO: 10511 - RNA, 20 nt, Homo sapiens
  source 1..20: mol_type = genomic RNA
tctcttaggtgctcactcgc

SEQ ID NO: 10512 - RNA, 20 nt, Homo sapiens
  source 1..20: mol_type = genomic RNA
ctcttaggtgctcactcgct

SEQ ID NO: 10513 - RNA, 20 nt, Homo sapiens
  source 1..20: mol_type = genomic RNA
tcttaggtgctcactcgctt

SEQ ID NO: 10514 - RNA, 20 nt, Homo sapiens
  source 1..20: mol_type = genomic RNA
cttaggtgctcactcgcttt

SEQ ID NO: 10515 - RNA, 20 nt, Homo sapiens
  source 1..20: mol_type = genomic RNA
ttaggtgctcactcgctttg

SEQ ID NO: 10516 - RNA, 20 nt, Homo sapiens
  source 1..20: mol_type = genomic RNA
taggtgctcactcgctttgg

SEQ ID NO: 10517 - RNA, 20 nt, Homo sapiens
  source 1..20: mol_type = genomic RNA
aggtgctcactcgctttggg

SEQ ID NO: 10518 - RNA, 20 nt, Homo sapiens
  source 1..20: mol_type = genomic RNA
ggtgctcactcgctttgggt

SEQ ID NO: 10519 - RNA, 20 nt, Homo sapiens
  source 1..20: mol_type = genomic RNA
gtgctcactcgctttgggtg

SEQ ID NO: 10520 - RNA, 20 nt, Homo sapiens
  source 1..20: mol_type = genomic RNA
tgctcactcgctttgggtgc

SEQ ID NO: 10521 - RNA, 20 nt, Homo sapiens
  source 1..20: mol_type = genomic RNA
gctcactcgctttgggtgca

SEQ ID NO: 10522 - RNA, 20 nt, Homo sapiens
  source 1..20: mol_type = genomic RNA
ctcactcgctttgggtgcac

SEQ ID NO: 10523 - RNA, 20 nt, Homo sapiens
  source 1..20: mol_type = genomic RNA
tcactcgctttgggtgcacc

SEQ ID NO: 10524 - RNA, 20 nt, Homo sapiens
  source 1..20: mol_type = genomic RNA
cactcgctttgggtgcacct

SEQ ID NO: 10525 - RNA, 20 nt, Homo sapiens
  source 1..20: mol_type = genomic RNA
actcgctttgggtgcacctg

SEQ ID NO: 10526 - RNA, 20 nt, Homo sapiens
  source 1..20: mol_type = genomic RNA
ctcgctttgggtgcacctgg

SEQ ID NO: 10527 - RNA, 20 nt, Homo sapiens
  source 1..20: mol_type = genomic RNA
tcgctttgggtgcacctggc

SEQ ID NO: 10528 - RNA, 20 nt, Homo sapiens
  source 1..20: mol_type = genomic RNA
cgctttgggtgcacctggcc

SEQ ID NO: 10529 - RNA, 20 nt, Homo sapiens
  source 1..20: mol_type = genomic RNA
gctttgggtgcacctggcct

SEQ ID NO: 10530 - RNA, 20 nt, Homo sapiens
  source 1..20: mol_type = genomic RNA
ctttgggtgcacctggcctg

SEQ ID NO: 10531 - RNA, 20 nt, Homo sapiens
  source 1..20: mol_type = genomic RNA
tttgggtgcacctggcctgc

SEQ ID NO: 10532 - RNA, 20 nt, Homo sapiens
  source 1..20: mol_type = genomic RNA
ttgggtgcacctggcctgct

SEQ ID NO: 10533 - RNA, 20 nt, Homo sapiens
  source 1..20: mol_type = genomic RNA
tgggtgcacctggcctgctc

SEQ ID NO: 10534 - RNA, 20 nt, Homo sapiens
  source 1..20: mol_type = genomic RNA
gggtgcacctggcctgctct

SEQ ID NO: 10535 - RNA, 20 nt, Homo sapiens
  source 1..20: mol_type = genomic RNA
ggtgcacctggcctgctctt

SEQ ID NO: 10536 - RNA, 20 nt, Homo sapiens
  source 1..20: mol_type = genomic RNA
gtgcacctggcctgctcttc

SEQ ID NO: 10537 - RNA, 20 nt, Homo sapiens
  source 1..20: mol_type = genomic RNA
tgcacctggcctgctcttcc

SEQ ID NO: 10538 - RNA, 20 nt, Homo sapiens
  source 1..20: mol_type = genomic RNA
gcacctggcctgctcttccc

SEQ ID NO: 10539 - RNA, 20 nt, Homo sapiens
  source 1..20: mol_type = genomic RNA
cacctggcctgctcttccca

SEQ ID NO: 10540 - RNA, 20 nt, Homo sapiens
  source 1..20: mol_type = genomic RNA
acctggcctgctcttcccat

SEQ ID NO: 10541 - RNA, 20 nt, Homo sapiens
  source 1..20: mol_type = genomic RNA
cctggcctgctcttcccatg

SEQ ID NO: 10542 - RNA, 20 nt, Homo sapiens
  source 1..20: mol_type = genomic RNA
ctggcctgctcttcccatgt

SEQ ID NO: 10543 - RNA, 20 nt, Homo sapiens
  source 1..20: mol_type = genomic RNA
tggcctgctcttcccatgtt

SEQ ID NO: 10544 - RNA, 20 nt, Homo sapiens
  source 1..20: mol_type = genomic RNA
ggcctgctcttcccatgttg

SEQ ID NO: 10545 - RNA, 20 nt, Homo sapiens
  source 1..20: mol_type = genomic RNA
gcctgctcttcccatgttgg

SEQ ID NO: 10546 - RNA, 20 nt, Homo sapiens
  source 1..20: mol_type = genomic RNA
cctgctcttcccatgttggc

SEQ ID NO: 10547 - RNA, 20 nt, Homo sapiens
  source 1..20: mol_type = genomic RNA
ctgctcttcccatgttggcc

SEQ ID NO: 10548 - RNA, 20 nt, Homo sapiens
  source 1..20: mol_type = genomic RNA
tgctcttcccatgttggcct

SEQ ID NO: 10549 - RNA, 20 nt, Homo sapiens
  source 1..20: mol_type = genomic RNA
gctcttcccatgttggcctc

SEQ ID NO: 10550 - RNA, 20 nt, Homo sapiens
  source 1..20: mol_type = genomic RNA
ctcttcccatgttggcctct

SEQ ID NO: 10551 - RNA, 20 nt, Homo sapiens
  source 1..20: mol_type = genomic RNA
tcttcccatgttggcctctg

SEQ ID NO: 10552 - RNA, 20 nt, Homo sapiens
  source 1..20: mol_type = genomic RNA
cttcccatgttggcctctgc

SEQ ID NO: 10553 - RNA, 20 nt, Homo sapiens
  source 1..20: mol_type = genomic RNA
ttcccatgttggcctctgca

SEQ ID NO: 10554 - RNA, 20 nt, Homo sapiens
  source 1..20: mol_type = genomic RNA
tcccatgttggcctctgcaa

SEQ ID NO: 10555 - RNA, 20 nt, Homo sapiens
  source 1..20: mol_type = genomic RNA
cccatgttggcctctgcaac

SEQ ID NO: 10556 - RNA, 20 nt, Homo sapiens
  source 1..20: mol_type = genomic RNA
ccatgttggcctctgcaacc

SEQ ID NO: 10557 - RNA, 20 nt, Homo sapiens
  source 1..20: mol_type = genomic RNA
catgttggcctctgcaacca

SEQ ID NO: 10558 - RNA, 20 nt, Homo sapiens
  source 1..20: mol_type = genomic RNA
atgttggcctctgcaaccac

SEQ ID NO: 10559 - RNA, 20 nt, Homo sapiens
  source 1..20: mol_type = genomic RNA
tgttggcctctgcaaccaca

SEQ ID NO: 10560 - RNA, 20 nt, Homo sapiens
  source 1..20: mol_type = genomic RNA
gttggcctctgcaaccacac

SEQ ID NO: 10561 - RNA, 20 nt, Homo sapiens
  source 1..20: mol_type = genomic RNA
ttggcctctgcaaccacaca

SEQ ID NO: 10562 - RNA, 20 nt, Homo sapiens
  source 1..20: mol_type = genomic RNA
tggcctctgcaaccacacag

SEQ ID NO: 10563 - RNA, 20 nt, Homo sapiens
  source 1..20: mol_type = genomic RNA
ggcctctgcaaccacacagg

SEQ ID NO: 10564 - RNA, 20 nt, Homo sapiens
  source 1..20: mol_type = genomic RNA
gcctctgcaaccacacaggg

SEQ ID NO: 10565 - RNA, 20 nt, Homo sapiens
  source 1..20: mol_type = genomic RNA
cctctgcaaccacacaggga

SEQ ID NO: 10566 - RNA, 20 nt, Homo sapiens
  source 1..20: mol_type = genomic RNA
ctctgcaaccacacagggat

SEQ ID NO: 10567 - RNA, 20 nt, Homo sapiens
  source 1..20: mol_type = genomic RNA
tctgcaaccacacagggata

SEQ ID NO: 10568 - RNA, 20 nt, Homo sapiens
  source 1..20: mol_type = genomic RNA
ctgcaaccacacagggatat

SEQ ID NO: 10569 - RNA, 20 nt, Homo sapiens
  source 1..20: mol_type = genomic RNA
tgcaaccacacagggatatt

SEQ ID NO: 10570 - RNA, 20 nt, Homo sapiens
  source 1..20: mol_type = genomic RNA
gcaaccacacagggatattt

SEQ ID NO: 10571 - RNA, 20 nt, Homo sapiens
  source 1..20: mol_type = genomic RNA
caaccacacagggatatttc

SEQ ID NO: 10572 - RNA, 20 nt, Homo sapiens
  source 1..20: mol_type = genomic RNA
aaccacacagggatatttct

SEQ ID NO: 10573 - RNA, 20 nt, Homo sapiens
  source 1..20: mol_type = genomic RNA
accacacagggatatttctg

SEQ ID NO: 10574 - RNA, 20 nt, Homo sapiens
  source 1..20: mol_type = genomic RNA
ccacacagggatatttctgc

SEQ ID NO: 10575 - RNA, 20 nt, Homo sapiens
  source 1..20: mol_type = genomic RNA
cacacagggatatttctgct

SEQ ID NO: 10576 - RNA, 20 nt, Homo sapiens
  source 1..20: mol_type = genomic RNA
acacagggatatttctgcta

SEQ ID NO: 10577 - RNA, 20 nt, Homo sapiens
  source 1..20: mol_type = genomic RNA
cacagggatatttctgctat

SEQ ID NO: 10578 - RNA, 20 nt, Homo sapiens
  source 1..20: mol_type = genomic RNA
acagggatatttctgctatg

SEQ ID NO: 10579 - RNA, 20 nt, Homo sapiens
  source 1..20: mol_type = genomic RNA
cagggatatttctgctatgc

SEQ ID NO: 10580 - RNA, 20 nt, Homo sapiens
  source 1..20: mol_type = genomic RNA
agggatatttctgctatgca

SEQ ID NO: 10581 - RNA, 20 nt, Homo sapiens
  source 1..20: mol_type = genomic RNA
gggatatttctgctatgcac

SEQ ID NO: 10582 - RNA, 20 nt, Homo sapiens
  source 1..20: mol_type = genomic RNA
ggatatttctgctatgcacc

SEQ ID NO: 10583 - RNA, 20 nt, Homo sapiens
  source 1..20: mol_type = genomic RNA
gatatttctgctatgcacca

SEQ ID NO: 10584 - RNA, 20 nt, Homo sapiens
  source 1..20: mol_type = genomic RNA
atatttctgctatgcaccag

SEQ ID NO: 10585 - RNA, 20 nt, Homo sapiens
  source 1..20: mol_type = genomic RNA
tatttctgctatgcaccagc

SEQ ID NO: 10586 - RNA, 20 nt, Homo sapiens
  source 1..20: mol_type = genomic RNA
atttctgctatgcaccagcc

SEQ ID NO: 10587 - RNA, 20 nt, Homo sapiens
  source 1..20: mol_type = genomic RNA
tttctgctatgcaccagcct

SEQ ID NO: 10588 - RNA, 20 nt, Homo sapiens
  source 1..20: mol_type = genomic RNA
ttctgctatgcaccagcctc

SEQ ID NO: 10589 - RNA, 20 nt, Homo sapiens
  source 1..20: mol_type = genomic RNA
tctgctatgcaccagcctca

SEQ ID NO: 10590 - RNA, 20 nt, Homo sapiens
  source 1..20: mol_type = genomic RNA
ctgctatgcaccagcctcac

SEQ ID NO: 10591 - RNA, 20 nt, Homo sapiens
  source 1..20: mol_type = genomic RNA
tgctatgcaccagcctcact

SEQ ID NO: 10592 - RNA, 20 nt, Homo sapiens
  source 1..20: mol_type = genomic RNA
gctatgcaccagcctcactc

SEQ ID NO: 10593 - RNA, 20 nt, Homo sapiens
  source 1..20: mol_type = genomic RNA
ctatgcaccagcctcactcc

SEQ ID NO: 10594 - RNA, 20 nt, Homo sapiens
  source 1..20: mol_type = genomic RNA
tatgcaccagcctcactcca

SEQ ID NO: 10595 - RNA, 20 nt, Homo sapiens
  source 1..20: mol_type = genomic RNA
atgcaccagcctcactccac

SEQ ID NO: 10596 - RNA, 20 nt, Homo sapiens
  source 1..20: mol_type = genomic RNA
tgcaccagcctcactccacc

SEQ ID NO: 10597 - RNA, 20 nt, Homo sapiens
  source 1..20: mol_type = genomic RNA
gcaccagcctcactccacct

SEQ ID NO: 10598 - RNA, 20 nt, Homo sapiens
  source 1..20: mol_type = genomic RNA
caccagcctcactccacctt

SEQ ID NO: 10599 - RNA, 20 nt, Homo sapiens
  source 1..20: mol_type = genomic RNA
accagcctcactccaccttc

SEQ ID NO: 10600 - RNA, 20 nt, Homo sapiens
  source 1..20: mol_type = genomic RNA
ccagcctcactccaccttcc

SEQ ID NO: 10601 - RNA, 20 nt, Homo sapiens
  source 1..20: mol_type = genomic RNA
cagcctcactccaccttcct

SEQ ID NO: 10602 - RNA, 20 nt, Homo sapiens
  source 1..20: mol_type = genomic RNA
agcctcactccaccttcctt

SEQ ID NO: 10603 - RNA, 20 nt, Homo sapiens
  source 1..20: mol_type = genomic RNA
gcctcactccaccttccttc

SEQ ID NO: 10604 - RNA, 20 nt, Homo sapiens
  source 1..20: mol_type = genomic RNA
cctcactccaccttccttcc

SEQ ID NO: 10605 - RNA, 20 nt, Homo sapiens
  source 1..20: mol_type = genomic RNA
ctcactccaccttccttcca

SEQ ID NO: 10606 - RNA, 20 nt, Homo sapiens
  source 1..20: mol_type = genomic RNA
tcactccaccttccttccat

SEQ ID NO: 10607 - RNA, 20 nt, Homo sapiens
  source 1..20: mol_type = genomic RNA
cactccaccttccttccatc

SEQ ID NO: 10608 - RNA, 20 nt, Homo sapiens
  source 1..20: mol_type = genomic RNA
actccaccttccttccatca

SEQ ID NO: 10609 - RNA, 20 nt, Homo sapiens
  source 1..20: mol_type = genomic RNA
ctccaccttccttccatcaa

SEQ ID NO: 10610 - RNA, 20 nt, Homo sapiens
  source 1..20: mol_type = genomic RNA
tccaccttccttccatcaaa

SEQ ID NO: 10611 - RNA, 20 nt, Homo sapiens
  source 1..20: mol_type = genomic RNA
ccaccttccttccatcaaaa

SEQ ID NO: 10612 - RNA, 20 nt, Homo sapiens
  source 1..20: mol_type = genomic RNA
caccttccttccatcaaaaa

SEQ ID NO: 10613 - RNA, 20 nt, Homo sapiens
  source 1..20: mol_type = genomic RNA
accttccttccatcaaaaat

SEQ ID NO: 10614 - RNA, 20 nt, Homo sapiens
  source 1..20: mol_type = genomic RNA
ccttccttccatcaaaaata

SEQ ID NO: 10615 - RNA, 20 nt, Homo sapiens
  source 1..20: mol_type = genomic RNA
cttccttccatcaaaaatat

SEQ ID NO: 10616 - RNA, 20 nt, Homo sapiens
  source 1..20: mol_type = genomic RNA
ttccttccatcaaaaatatg

SEQ ID NO: 10617 - RNA, 20 nt, Homo sapiens
  source 1..20: mol_type = genomic RNA
tccttccatcaaaaatatgt

SEQ ID NO: 10618 - RNA, 20 nt, Homo sapiens
  source 1..20: mol_type = genomic RNA
ccttccatcaaaaatatgtg

SEQ ID NO: 10619 - RNA, 20 nt, Homo sapiens
  source 1..20: mol_type = genomic RNA
cttccatcaaaaatatgtgt

SEQ ID NO: 10620 - RNA, 20 nt, Homo sapiens
  source 1..20: mol_type = genomic RNA
ttccatcaaaaatatgtgtg

SEQ ID NO: 10621 - RNA, 20 nt, Homo sapiens
  source 1..20: mol_type = genomic RNA
tccatcaaaaatatgtgtgt

SEQ ID NO: 10622 - RNA, 20 nt, Homo sapiens
  source 1..20: mol_type = genomic RNA
ccatcaaaaatatgtgtgtg

SEQ ID NO: 10623 - RNA, 20 nt, Homo sapiens
  source 1..20: mol_type = genomic RNA
catcaaaaatatgtgtgtgt

SEQ ID NO: 10624 - RNA, 20 nt, Homo sapiens
  source 1..20: mol_type = genomic RNA
atcaaaaatatgtgtgtgtg

SEQ ID NO: 10625 - RNA, 20 nt, Homo sapiens
  source 1..20: mol_type = genomic RNA
tcaaaaatatgtgtgtgtgt

SEQ ID NO: 10626 - RNA, 20 nt, Homo sapiens
  source 1..20: mol_type = genomic RNA
caaaaatatgtgtgtgtgtc

SEQ ID NO: 10627 - RNA, 20 nt, Homo sapiens
  source 1..20: mol_type = genomic RNA
aaaaatatgtgtgtgtgtct

SEQ ID NO: 10628 - RNA, 20 nt, Homo sapiens
  source 1..20: mol_type = genomic RNA
aaaatatgtgtgtgtgtctc

SEQ ID NO: 10629 - RNA, 20 nt, Homo sapiens
  source 1..20: mol_type = genomic RNA
aaatatgtgtgtgtgtctca

SEQ ID NO: 10630 - RNA, 20 nt, Homo sapiens
  source 1..20: mol_type = genomic RNA
aatatgtgtgtgtgtctcag

SEQ ID NO: 10631 - RNA, 20 nt, Homo sapiens
  source 1..20: mol_type = genomic RNA
atatgtgtgtgtgtctcagt

SEQ ID NO: 10632 - RNA, 20 nt, Homo sapiens
  source 1..20: mol_type = genomic RNA
tatgtgtgtgtgtctcagtc

SEQ ID NO: 10633 - RNA, 20 nt, Homo sapiens
  source 1..20: mol_type = genomic RNA
atgtgtgtgtgtctcagtcc

SEQ ID NO: 10634 - RNA, 20 nt, Homo sapiens
  source 1..20: mol_type = genomic RNA
tgtgtgtgtgtctcagtccc

SEQ ID NO: 10635 - RNA, 20 nt, Homo sapiens
  source 1..20: mol_type = genomic RNA
gtgtgtgtgtctcagtccct

SEQ ID NO: 10636 - RNA, 20 nt, Homo sapiens
  source 1..20: mol_type = genomic RNA
tgtgtgtgtctcagtccctg

SEQ ID NO: 10637 - RNA, 20 nt, Homo sapiens
  source 1..20: mol_type = genomic RNA
gtgtgtgtctcagtccctgt

SEQ ID NO: 10638 - RNA, 20 nt, Homo sapiens
  source 1..20: mol_type = genomic RNA
tgtgtgtctcagtccctgta

SEQ ID NO: 10639 - RNA, 20 nt, Homo sapiens
  source 1..20: mol_type = genomic RNA
gtgtgtctcagtccctgtaa

SEQ ID NO: 10640 - RNA, 20 nt, Homo sapiens
  source 1..20: mol_type = genomic RNA
tgtgtctcagtccctgtaag

SEQ ID NO: 10641 - RNA, 20 nt, Homo sapiens
  source 1..20: mol_type = genomic RNA
gtgtctcagtccctgtaagt

SEQ ID NO: 10642 - RNA, 20 nt, Homo sapiens
  source 1..20: mol_type = genomic RNA
tgtctcagtccctgtaagtc

SEQ ID NO: 10643 - RNA, 20 nt, Homo sapiens
  source 1..20: mol_type = genomic RNA
gtctcagtccctgtaagtca

SEQ ID NO: 10644 - RNA, 20 nt, Homo sapiens
  source 1..20: mol_type = genomic RNA
tctcagtccctgtaagtcat

SEQ ID NO: 10645 - RNA, 20 nt, Homo sapiens
  source 1..20: mol_type = genomic RNA
ctcagtccctgtaagtcatg

SEQ ID NO: 10646 - RNA, 20 nt, Homo sapiens
  source 1..20: mol_type = genomic RNA
tcagtccctgtaagtcatgt

SEQ ID NO: 10647 - RNA, 20 nt, Homo sapiens
  source 1..20: mol_type = genomic RNA
cagtccctgtaagtcatgtc

SEQ ID NO: 10648 - RNA, 20 nt, Homo sapiens
  source 1..20: mol_type = genomic RNA
agtccctgtaagtcatgtcc

SEQ ID NO: 10649 - RNA, 20 nt, Homo sapiens
  source 1..20: mol_type = genomic RNA
gtccctgtaagtcatgtcct

SEQ ID NO: 10650 - RNA, 20 nt, Homo sapiens
  source 1..20: mol_type = genomic RNA
tccctgtaagtcatgtcctt

SEQ ID NO: 10651 - RNA, 20 nt, Homo sapiens
  source 1..20: mol_type = genomic RNA
ccctgtaagtcatgtccttc

SEQ ID NO: 10652 - RNA, 20 nt, Homo sapiens
  source 1..20: mol_type = genomic RNA
cctgtaagtcatgtccttca

SEQ ID NO: 10653 - RNA, 20 nt, Homo sapiens
  source 1..20: mol_type = genomic RNA
ctgtaagtcatgtccttcac

SEQ ID NO: 10654 - RNA, 20 nt, Homo sapiens
  source 1..20: mol_type = genomic RNA
tgtaagtcatgtccttcaca

SEQ ID NO: 10655 - RNA, 20 nt, Homo sapiens
  source 1..20: mol_type = genomic RNA
gtaagtcatgtccttcacag

SEQ ID NO: 10656 - RNA, 20 nt, Homo sapiens
  source 1..20: mol_type = genomic RNA
taagtcatgtccttcacagg

SEQ ID NO: 10657 - RNA, 20 nt, Homo sapiens
  source 1..20: mol_type = genomic RNA
aagtcatgtccttcacaggg

SEQ ID NO: 10658 - RNA, 20 nt, Homo sapiens
  source 1..20: mol_type = genomic RNA
agtcatgtccttcacaggga

SEQ ID NO: 10659 - RNA, 20 nt, Homo sapiens
  source 1..20: mol_type = genomic RNA
gtcatgtccttcacagggag

SEQ ID NO: 10660 - RNA, 20 nt, Homo sapiens
  source 1..20: mol_type = genomic RNA
tcatgtccttcacagggaga

SEQ ID NO: 10661 - RNA, 20 nt, Homo sapiens
  source 1..20: mol_type = genomic RNA
catgtccttcacagggagaa

SEQ ID NO: 10662 - RNA, 20 nt, Homo sapiens
  source 1..20: mol_type = genomic RNA
atgtccttcacagggagaat

SEQ ID NO: 10663 - RNA, 20 nt, Homo sapiens
  source 1..20: mol_type = genomic RNA
tgtccttcacagggagaatt

SEQ ID NO: 10664 - RNA, 20 nt, Homo sapiens
  source 1..20: mol_type = genomic RNA
gtccttcacagggagaatta

SEQ ID NO: 10665 - RNA, 20 nt, Homo sapiens
  source 1..20: mol_type = genomic RNA
tccttcacagggagaattaa

SEQ ID NO: 10666 - RNA, 20 nt, Homo sapiens
  source 1..20: mol_type = genomic RNA
ccttcacagggagaattaac

SEQ ID NO: 10667 - RNA, 20 nt, Homo sapiens
  source 1..20: mol_type = genomic RNA
cttcacagggagaattaacc

SEQ ID NO: 10668 - RNA, 20 nt, Homo sapiens
  source 1..20: mol_type = genomic RNA
ttcacagggagaattaaccc

SEQ ID NO: 10669 - RNA, 20 nt, Homo sapiens
  source 1..20: mol_type = genomic RNA
tcacagggagaattaaccct

SEQ ID NO: 10670 - RNA, 20 nt, Homo sapiens
  source 1..20: mol_type = genomic RNA
cacagggagaattaaccctt

SEQ ID NO: 10671 - RNA, 20 nt, Homo sapiens
  source 1..20: mol_type = genomic RNA
acagggagaattaacccttc

SEQ ID NO: 10672 - RNA, 20 nt, Homo sapiens
  source 1..20: mol_type = genomic RNA
cagggagaattaacccttcg

SEQ ID NO: 10673 - RNA, 20 nt, Homo sapiens
  source 1..20: mol_type = genomic RNA
agggagaattaacccttcga

SEQ ID NO: 10674 - RNA, 20 nt, Homo sapiens
  source 1..20: mol_type = genomic RNA
gggagaattaacccttcgat

SEQ ID NO: 10675 - RNA, 20 nt, Homo sapiens
  source 1..20: mol_type = genomic RNA
ggagaattaacccttcgata

SEQ ID NO: 10676 - RNA, 20 nt, Homo sapiens
  source 1..20: mol_type = genomic RNA
gagaattaacccttcgatat

SEQ ID NO: 10677 - RNA, 20 nt, Homo sapiens
  source 1..20: mol_type = genomic RNA
agaattaacccttcgatata

SEQ ID NO: 10678 - RNA, 20 nt, Homo sapiens
  source 1..20: mol_type = genomic RNA
gaattaacccttcgatatac

SEQ ID NO: 10679 - RNA, 20 nt, Homo sapiens
  source 1..20: mol_type = genomic RNA
aattaacccttcgatataca

SEQ ID NO: 10680 - RNA, 20 nt, Homo sapiens
  source 1..20: mol_type = genomic RNA
attaacccttcgatatacat

SEQ ID NO: 10681 - RNA, 20 nt, Homo sapiens
  source 1..20: mol_type = genomic RNA
ttaacccttcgatatacatg

SEQ ID NO: 10682 - RNA, 20 nt, Homo sapiens
  source 1..20: mol_type = genomic RNA
taacccttcgatatacatgg

SEQ ID NO: 10683 - RNA, 20 nt, Homo sapiens
  source 1..20: mol_type = genomic RNA
aacccttcgatatacatggc

SEQ ID NO: 10684 - RNA, 20 nt, Homo sapiens
  source 1..20: mol_type = genomic RNA
acccttcgatatacatggca

SEQ ID NO: 10685 - RNA, 20 nt, Homo sapiens
  source 1..20: mol_type = genomic RNA
cccttcgatatacatggcag

SEQ ID NO: 10686 - RNA, 20 nt, Homo sapiens
  source 1..20: mol_type = genomic RNA
ccttcgatatacatggcaga

SEQ ID NO: 10687 - RNA, 20 nt, Homo sapiens
  source 1..20: mol_type = genomic RNA
cttcgatatacatggcagag

SEQ ID NO: 10688 - RNA, 20 nt, Homo sapiens
  source 1..20: mol_type = genomic RNA
ttcgatatacatggcagagt

SEQ ID NO: 10689 - RNA, 20 nt, Homo sapiens
  source 1..20: mol_type = genomic RNA
tcgatatacatggcagagtt

SEQ ID NO: 10690 - RNA, 20 nt, Homo sapiens
  source 1..20: mol_type = genomic RNA
cgatatacatggcagagttt

SEQ ID NO: 10691 - RNA, 20 nt, Homo sapiens
  source 1..20: mol_type = genomic RNA
gatatacatggcagagtttt

SEQ ID NO: 10692 - RNA, 20 nt, Homo sapiens
  source 1..20: mol_type = genomic RNA
atatacatggcagagttttg

SEQ ID NO: 10693 - RNA, 20 nt, Homo sapiens
  source 1..20: mol_type = genomic RNA
tatacatggcagagttttgt

SEQ ID NO: 10694 - RNA, 20 nt, Homo sapiens
  source 1..20: mol_type = genomic RNA
atacatggcagagttttgtg

SEQ ID NO: 10695 - RNA, 20 nt, Homo sapiens
  source 1..20: mol_type = genomic RNA
tacatggcagagttttgtgg

SEQ ID NO: 10696 - RNA, 20 nt, Homo sapiens
  source 1..20: mol_type = genomic RNA
acatggcagagttttgtggg

SEQ ID NO: 10697 - RNA, 20 nt, Homo sapiens
  source 1..20: mol_type = genomic RNA
catggcagagttttgtggga

SEQ ID NO: 10698 - RNA, 20 nt, Homo sapiens
  source 1..20: mol_type = genomic RNA
atggcagagttttgtgggaa

SEQ ID NO: 10699 - RNA, 20 nt, Homo sapiens
  source 1..20: mol_type = genomic RNA
tggcagagttttgtgggaaa

SEQ ID NO: 10700 - RNA, 20 nt, Homo sapiens
  source 1..20: mol_type = genomic RNA
ggcagagttttgtgggaaaa

SEQ ID NO: 10701 - RNA, 20 nt, Homo sapiens
  source 1..20: mol_type = genomic RNA
gcagagttttgtgggaaaag

SEQ ID NO: 10702 - RNA, 20 nt, Homo sapiens
  source 1..20: mol_type = genomic RNA
cagagttttgtgggaaaaga

SEQ ID NO: 10703 - RNA, 20 nt, Homo sapiens
  source 1..20: mol_type = genomic RNA
agagttttgtgggaaaagaa

SEQ ID NO: 10704 - RNA, 20 nt, Homo sapiens
  source 1..20: mol_type = genomic RNA
gagttttgtgggaaaagaat

SEQ ID NO: 10705 - RNA, 20 nt, Homo sapiens
  source 1..20: mol_type = genomic RNA
agttttgtgggaaaagaatt

SEQ ID NO: 10706 - RNA, 20 nt, Homo sapiens
  source 1..20: mol_type = genomic RNA
gttttgtgggaaaagaattg

SEQ ID NO: 10707 - RNA, 20 nt, Homo sapiens
  source 1..20: mol_type = genomic RNA
ttttgtgggaaaagaattga

SEQ ID NO: 10708 - RNA, 20 nt, Homo sapiens
  source 1..20: mol_type = genomic RNA
tttgtgggaaaagaattgaa

SEQ ID NO: 10709 - RNA, 20 nt, Homo sapiens
  source 1..20: mol_type = genomic RNA
ttgtgggaaaagaattgaat

SEQ ID NO: 10710 - RNA, 20 nt, Homo sapiens
  source 1..20: mol_type = genomic RNA
tgtgggaaaagaattgaatg

SEQ ID NO: 10711 - RNA, 20 nt, Homo sapiens
  source 1..20: mol_type = genomic RNA
gtgggaaaagaattgaatga

SEQ ID NO: 10712 - RNA, 20 nt, Homo sapiens
  source 1..20: mol_type = genomic RNA
tgggaaaagaattgaatgaa

SEQ ID NO: 10713 - RNA, 20 nt, Homo sapiens
  source 1..20: mol_type = genomic RNA
gggaaaagaattgaatgaaa

SEQ ID NO: 10714 - RNA, 20 nt, Homo sapiens
  source 1..20: mol_type = genomic RNA
ggaaaagaattgaatgaaaa

SEQ ID NO: 10715 - RNA, 20 nt, Homo sapiens
  source 1..20: mol_type = genomic RNA
gaaaagaattgaatgaaaag

SEQ ID NO: 10716 - RNA, 20 nt, Homo sapiens
  source 1..20: mol_type = genomic RNA
aaaagaattgaatgaaaagt

SEQ ID NO: 10717 - RNA, 20 nt, Homo sapiens
  source 1..20: mol_type = genomic RNA
aaagaattgaatgaaaagtc

SEQ ID NO: 10718 - RNA, 20 nt, Homo sapiens
  source 1..20: mol_type = genomic RNA
aagaattgaatgaaaagtca

SEQ ID NO: 10719 - RNA, 20 nt, Homo sapiens
  source 1..20: mol_type = genomic RNA
agaattgaatgaaaagtcag

SEQ ID NO: 10720 - RNA, 20 nt, Homo sapiens
  source 1..20: mol_type = genomic RNA
gaattgaatgaaaagtcagg

SEQ ID NO: 10721 - RNA, 20 nt, Homo sapiens
  source 1..20: mol_type = genomic RNA
aattgaatgaaaagtcagga

SEQ ID NO: 10722 - RNA, 20 nt, Homo sapiens
  source 1..20: mol_type = genomic RNA
attgaatgaaaagtcaggag

SEQ ID NO: 10723 - RNA, 20 nt, Homo sapiens
  source 1..20: mol_type = genomic RNA
ttgaatgaaaagtcaggaga

SEQ ID NO: 10724 - RNA, 20 nt, Homo sapiens
  source 1..20: mol_type = genomic RNA
tgaatgaaaagtcaggagat

SEQ ID NO: 10725 - RNA, 20 nt, Homo sapiens
  source 1..20: mol_type = genomic RNA
gaatgaaaagtcaggagatc

SEQ ID NO: 10726 - RNA, 20 nt, Homo sapiens
  source 1..20: mol_type = genomic RNA
aatgaaaagtcaggagatca

SEQ ID NO: 10727 - RNA, 20 nt, Homo sapiens
  source 1..20: mol_type = genomic RNA
atgaaaagtcaggagatcag

SEQ ID NO: 10728 - RNA, 20 nt, Homo sapiens
  source 1..20: mol_type = genomic RNA
tgaaaagtcaggagatcaga

SEQ ID NO: 10729 - RNA, 20 nt, Homo sapiens
  source 1..20: mol_type = genomic RNA
gaaaagtcaggagatcagaa

SEQ ID NO: 10730 - RNA, 20 nt, Homo sapiens
  source 1..20: mol_type = genomic RNA
aaaagtcaggagatcagaat

SEQ ID NO: 10731 - RNA, 20 nt, Homo sapiens
  source 1..20: mol_type = genomic RNA
aaagtcaggagatcagaatt

SEQ ID NO: 10732 - RNA, 20 nt, Homo sapiens
  source 1..20: mol_type = genomic RNA
aagtcaggagatcagaattt

SEQ ID NO: 10733 - RNA, 20 nt, Homo sapiens
  source 1..20: mol_type = genomic RNA
agtcaggagatcagaatttt

SEQ ID NO: 10734 - RNA, 20 nt, Homo sapiens
  source 1..20: mol_type = genomic RNA
gtcaggagatcagaatttta

SEQ ID NO: 10735 - RNA, 20 nt, Homo sapiens
  source 1..20: mol_type = genomic RNA
tcaggagatcagaattttaa

SEQ ID NO: 10736 - RNA, 20 nt, Homo sapiens
  source 1..20: mol_type = genomic RNA
caggagatcagaattttaaa

SEQ ID NO: 10737 - RNA, 20 nt, Homo sapiens
  source 1..20: mol_type = genomic RNA
aggagatcagaattttaaat

SEQ ID NO: 10738 - RNA, 20 nt, Homo sapiens
  source 1..20: mol_type = genomic RNA
ggagatcagaattttaaatt

SEQ ID NO: 10739 - RNA, 20 nt, Homo sapiens
  source 1..20: mol_type = genomic RNA
gagatcagaattttaaattt

SEQ ID NO: 10740 - RNA, 20 nt, Homo sapiens
  source 1..20: mol_type = genomic RNA
agatcagaattttaaatttg

SEQ ID NO: 10741 - RNA, 20 nt, Homo sapiens
  source 1..20: mol_type = genomic RNA
gatcagaattttaaatttga

SEQ ID NO: 10742 - RNA, 20 nt, Homo sapiens
  source 1..20: mol_type = genomic RNA
atcagaattttaaatttgac

SEQ ID NO: 10743 - RNA, 20 nt, Homo sapiens
  source 1..20: mol_type = genomic RNA
tcagaattttaaatttgact

SEQ ID NO: 10744 - RNA, 20 nt, Homo sapiens
  source 1..20: mol_type = genomic RNA
cagaattttaaatttgactt

SEQ ID NO: 10745 - RNA, 20 nt, Homo sapiens
  source 1..20: mol_type = genomic RNA
agaattttaaatttgactta

SEQ ID NO: 10746 - RNA, 20 nt, Homo sapiens
  source 1..20: mol_type = genomic RNA
gaattttaaatttgacttag

SEQ ID NO: 10747 - RNA, 20 nt, Homo sapiens
  source 1..20: mol_type = genomic RNA
aattttaaatttgacttagc

SEQ ID NO: 10748 - RNA, 20 nt, Homo sapiens
  source 1..20: mol_type = genomic RNA
attttaaatttgacttagcc

SEQ ID NO: 10749 - RNA, 20 nt, Homo sapiens
  source 1..20: mol_type = genomic RNA
ttttaaatttgacttagcca

SEQ ID NO: 10750 - RNA, 20 nt, Homo sapiens
  source 1..20: mol_type = genomic RNA
tttaaatttgacttagccac

SEQ ID NO: 10751 - RNA, 20 nt, Homo sapiens
  source 1..20: mol_type = genomic RNA
ttaaatttgacttagccact

SEQ ID NO: 10752 - RNA, 20 nt, Homo sapiens
  source 1..20: mol_type = genomic RNA
taaatttgacttagccacta

SEQ ID NO: 10753 - RNA, 20 nt, Homo sapiens
  source 1..20: mol_type = genomic RNA
aaatttgacttagccactaa

SEQ ID NO: 10754 - RNA, 20 nt, Homo sapiens
  source 1..20: mol_type = genomic RNA
aatttgacttagccactaac

SEQ ID NO: 10755 - RNA, 20 nt, Homo sapiens
  source 1..20: mol_type = genomic RNA
atttgacttagccactaact

SEQ ID NO: 10756 - RNA, 20 nt, Homo sapiens
  source 1..20: mol_type = genomic RNA
tttgacttagccactaacta

SEQ ID NO: 10757 - RNA, 20 nt, Homo sapiens
  source 1..20: mol_type = genomic RNA
ttgacttagccactaactag

SEQ ID NO: 10758 - RNA, 20 nt, Homo sapiens
  source 1..20: mol_type = genomic RNA
tgacttagccactaactagc

SEQ ID NO: 10759 - RNA, 20 nt, Homo sapiens
  source 1..20: mol_type = genomic RNA
gacttagccactaactagcc

SEQ ID NO: 10760 - RNA, 20 nt, Homo sapiens
  source 1..20: mol_type = genomic RNA
acttagccactaactagcca

SEQ ID NO: 10761 - RNA, 20 nt, Homo sapiens
  source 1..20: mol_type = genomic RNA
cttagccactaactagccat

SEQ ID NO: 10762 - RNA, 20 nt, Homo sapiens
  source 1..20: mol_type = genomic RNA
ttagccactaactagccatg

SEQ ID NO: 10763 - RNA, 20 nt, Homo sapiens
  source 1..20: mol_type = genomic RNA
tagccactaactagccatgt

SEQ ID NO: 10764 - RNA, 20 nt, Homo sapiens
  source 1..20: mol_type = genomic RNA
agccactaactagccatgta

SEQ ID NO: 10765 - RNA, 20 nt, Homo sapiens
  source 1..20: mol_type = genomic RNA
gccactaactagccatgtaa

SEQ ID NO: 10766 - RNA, 20 nt, Homo sapiens
  source 1..20: mol_type = genomic RNA
ccactaactagccatgtaac

SEQ ID NO: 10767 - RNA, 20 nt, Homo sapiens
  source 1..20: mol_type = genomic RNA
cactaactagccatgtaacc

SEQ ID NO: 10768 - RNA, 20 nt, Homo sapiens
  source 1..20: mol_type = genomic RNA
actaactagccatgtaacct

SEQ ID NO: 10769 - RNA, 20 nt, Homo sapiens
  source 1..20: mol_type = genomic RNA
ctaactagccatgtaacctt

SEQ ID NO: 10770 - RNA, 20 nt, Homo sapiens
  source 1..20: mol_type = genomic RNA
taactagccatgtaaccttg

SEQ ID NO: 10771 - RNA, 20 nt, Homo sapiens
  source 1..20: mol_type = genomic RNA
aactagccatgtaaccttgg

SEQ ID NO: 10772 - RNA, 20 nt, Homo sapiens
  source 1..20: mol_type = genomic RNA
actagccatgtaaccttggg

SEQ ID NO: 10773 - RNA, 20 nt, Homo sapiens
  source 1..20: mol_type = genomic RNA
ctagccatgtaaccttggga

SEQ ID NO: 10774 - RNA, 20 nt, Homo sapiens
  source 1..20: mol_type = genomic RNA
tagccatgtaaccttgggaa

SEQ ID NO: 10775 - RNA, 20 nt, Homo sapiens
  source 1..20: mol_type = genomic RNA
agccatgtaaccttgggaaa

SEQ ID NO: 10776 - RNA, 20 nt, Homo sapiens
  source 1..20: mol_type = genomic RNA
gccatgtaaccttgggaaag

SEQ ID NO: 10777 - RNA, 20 nt, Homo sapiens
  source 1..20: mol_type = genomic RNA
ccatgtaaccttgggaaagt

SEQ ID NO: 10778 - RNA, 20 nt, Homo sapiens
  source 1..20: mol_type = genomic RNA
catgtaaccttgggaaagtc

SEQ ID NO: 10779 - RNA, 20 nt, Homo sapiens
  source 1..20: mol_type = genomic RNA
atgtaaccttgggaaagtca

SEQ ID NO: 10780 - RNA, 20 nt, Homo sapiens
  source 1..20: mol_type = genomic RNA
tgtaaccttgggaaagtcat

SEQ ID NO: 10781 - RNA, 20 nt, Homo sapiens
  source 1..20: mol_type = genomic RNA
gtaaccttgggaaagtcatt

SEQ ID NO: 10782 - RNA, 20 nt, Homo sapiens
  source 1..20: mol_type = genomic RNA
taaccttgggaaagtcattt

SEQ ID NO: 10783 - RNA, 20 nt, Homo sapiens
  source 1..20: mol_type = genomic RNA
aaccttgggaaagtcatttc

SEQ ID NO: 10784 - RNA, 20 nt, Homo sapiens
  source 1..20: mol_type = genomic RNA
accttgggaaagtcatttcc

SEQ ID NO: 10785 - RNA, 20 nt, Homo sapiens
  source 1..20: mol_type = genomic RNA
ccttgggaaagtcatttccc

SEQ ID NO: 10786 - RNA, 20 nt, Homo sapiens
  source 1..20: mol_type = genomic RNA
cttgggaaagtcatttccca

SEQ ID NO: 10787 - RNA, 20 nt, Homo sapiens
  source 1..20: mol_type = genomic RNA
ttgggaaagtcatttcccat

SEQ ID NO: 10788 - RNA, 20 nt, Homo sapiens
  source 1..20: mol_type = genomic RNA
tgggaaagtcatttcccatt

SEQ ID NO: 10789 - RNA, 20 nt, Homo sapiens
  source 1..20: mol_type = genomic RNA
gggaaagtcatttcccattt

SEQ ID NO: 10790 - RNA, 20 nt, Homo sapiens
  source 1..20: mol_type = genomic RNA
ggaaagtcatttcccatttc

SEQ ID NO: 10791 - RNA, 20 nt, Homo sapiens
  source 1..20: mol_type = genomic RNA
gaaagtcatttcccatttct

SEQ ID NO: 10792 - RNA, 20 nt, Homo sapiens
  source 1..20: mol_type = genomic RNA
aaagtcatttcccatttctg

SEQ ID NO: 10793 - RNA, 20 nt, Homo sapiens
  source 1..20: mol_type = genomic RNA
aagtcatttcccatttctgg

SEQ ID NO: 10794 - RNA, 20 nt, Homo sapiens
  source 1..20: mol_type = genomic RNA
agtcatttcccatttctggg

SEQ ID NO: 10795 - RNA, 20 nt, Homo sapiens
  source 1..20: mol_type = genomic RNA
gtcatttcccatttctgggt

SEQ ID NO: 10796 - RNA, 20 nt, Homo sapiens
  source 1..20: mol_type = genomic RNA
tcatttcccatttctgggtc

SEQ ID NO: 10797 - RNA, 20 nt, Homo sapiens
  source 1..20: mol_type = genomic RNA
catttcccatttctgggtct

SEQ ID NO: 10798 - RNA, 20 nt, Homo sapiens
  source 1..20: mol_type = genomic RNA
atttcccatttctgggtctt

SEQ ID NO: 10799 - RNA, 20 nt, Homo sapiens
  source 1..20: mol_type = genomic RNA
tttcccatttctgggtcttg

SEQ ID NO: 10800 - RNA, 20 nt, Homo sapiens
  source 1..20: mol_type = genomic RNA
ttcccatttctgggtcttgc

SEQ ID NO: 10801 - RNA, 20 nt, Homo sapiens
  source 1..20: mol_type = genomic RNA
tcccatttctgggtcttgct

SEQ ID NO: 10802 - RNA, 20 nt, Homo sapiens
  source 1..20: mol_type = genomic RNA
cccatttctgggtcttgctt

SEQ ID NO: 10803 - RNA, 20 nt, Homo sapiens
  source 1..20: mol_type = genomic RNA
ccatttctgggtcttgcttt

SEQ ID NO: 10804 - RNA, 20 nt, Homo sapiens
  source 1..20: mol_type = genomic RNA
catttctgggtcttgctttt

SEQ ID NO: 10805 - RNA, 20 nt, Homo sapiens
  source 1..20: mol_type = genomic RNA
atttctgggtcttgcttttc

SEQ ID NO: 10806 - RNA, 20 nt, Homo sapiens
  source 1..20: mol_type = genomic RNA
tttctgggtcttgcttttct

SEQ ID NO: 10807 - RNA, 20 nt, Homo sapiens
  source 1..20: mol_type = genomic RNA
ttctgggtcttgcttttctt

SEQ ID NO: 10808 - RNA, 20 nt, Homo sapiens
  source 1..20: mol_type = genomic RNA
tctgggtcttgcttttcttt

SEQ ID NO: 10809 - RNA, 20 nt, Homo sapiens
  source 1..20: mol_type = genomic RNA
ctgggtcttgcttttctttc

SEQ ID NO: 10810 - RNA, 20 nt, Homo sapiens
  source 1..20: mol_type = genomic RNA
tgggtcttgcttttctttct

SEQ ID NO: 10811 - RNA, 20 nt, Homo sapiens
  source 1..20: mol_type = genomic RNA
gggtcttgcttttctttctg

SEQ ID NO: 10812 - RNA, 20 nt, Homo sapiens
  source 1..20: mol_type = genomic RNA
ggtcttgcttttctttctgt

SEQ ID NO: 10813 - RNA, 20 nt, Homo sapiens
  source 1..20: mol_type = genomic RNA
gtcttgcttttctttctgtt

SEQ ID NO: 10814 - RNA, 20 nt, Homo sapiens
  source 1..20: mol_type = genomic RNA
tcttgcttttctttctgtta

SEQ ID NO: 10815 - RNA, 20 nt, Homo sapiens
  source 1..20: mol_type = genomic RNA
cttgcttttctttctgttaa

SEQ ID NO: 10816 - RNA, 20 nt, Homo sapiens
  source 1..20: mol_type = genomic RNA
ttgcttttctttctgttaaa

SEQ ID NO: 10817 - RNA, 20 nt, Homo sapiens
  source 1..20: mol_type = genomic RNA
tgcttttctttctgttaaat

SEQ ID NO: 10818 - RNA, 20 nt, Homo sapiens
  source 1..20: mol_type = genomic RNA
gcttttctttctgttaaatg

SEQ ID NO: 10819 - RNA, 20 nt, Homo sapiens
  source 1..20: mol_type = genomic RNA
cttttctttctgttaaatga

SEQ ID NO: 10820 - RNA, 20 nt, Homo sapiens
  source 1..20: mol_type = genomic RNA
ttttctttctgttaaatgag

SEQ ID NO: 10821 - RNA, 20 nt, Homo sapiens
  source 1..20: mol_type = genomic RNA
tttctttctgttaaatgaga

SEQ ID NO: 10822 - RNA, 20 nt, Homo sapiens
  source 1..20: mol_type = genomic RNA
ttctttctgttaaatgagag

SEQ ID NO: 10823 - RNA, 20 nt, Homo sapiens
  source 1..20: mol_type = genomic RNA
tctttctgttaaatgagagg

SEQ ID NO: 10824 - RNA, 20 nt, Homo sapiens
  source 1..20: mol_type = genomic RNA
ctttctgttaaatgagagga

SEQ ID NO: 10825 - RNA, 20 nt, Homo sapiens
  source 1..20: mol_type = genomic RNA
tttctgttaaatgagaggaa

SEQ ID NO: 10826 - RNA, 20 nt, Homo sapiens
  source 1..20: mol_type = genomic RNA
ttctgttaaatgagaggaat

SEQ ID NO: 10827 - RNA, 20 nt, Homo sapiens
  source 1..20: mol_type = genomic RNA
tctgttaaatgagaggaatg

SEQ ID NO: 10828 - RNA, 20 nt, Homo sapiens
  source 1..20: mol_type = genomic RNA
ctgttaaatgagaggaatgt

SEQ ID NO: 10829 - RNA, 20 nt, Homo sapiens
  source 1..20: mol_type = genomic RNA
tgttaaatgagaggaatgtt

SEQ ID NO: 10830 - RNA, 20 nt, Homo sapiens
  source 1..20: mol_type = genomic RNA
gttaaatgagaggaatgtta

SEQ ID NO: 10831 - RNA, 20 nt, Homo sapiens
  source 1..20: mol_type = genomic RNA
ttaaatgagaggaatgttaa

SEQ ID NO: 10832 - RNA, 20 nt, Homo sapiens
  source 1..20: mol_type = genomic RNA
taaatgagaggaatgttaaa

SEQ ID NO: 10833 - RNA, 20 nt, Homo sapiens
  source 1..20: mol_type = genomic RNA
aaatgagaggaatgttaaat

SEQ ID NO: 10834 - RNA, 20 nt, Homo sapiens
  source 1..20: mol_type = genomic RNA
aatgagaggaatgttaaata

SEQ ID NO: 10835 - RNA, 20 nt, Homo sapiens
  source 1..20: mol_type = genomic RNA
atgagaggaatgttaaatat

SEQ ID NO: 10836 - RNA, 20 nt, Homo sapiens
  source 1..20: mol_type = genomic RNA
tgagaggaatgttaaatatc

SEQ ID NO: 10837 - RNA, 20 nt, Homo sapiens
  source 1..20: mol_type = genomic RNA
gagaggaatgttaaatatct

SEQ ID NO: 10838 - RNA, 20 nt, Homo sapiens
  source 1..20: mol_type = genomic RNA
agaggaatgttaaatatcta

SEQ ID NO: 10839 - RNA, 20 nt, Homo sapiens
  source 1..20: mol_type = genomic RNA
gaggaatgttaaatatctaa

SEQ ID NO: 10840 - RNA, 20 nt, Homo sapiens
  source 1..20: mol_type = genomic RNA
aggaatgttaaatatctaac

SEQ ID NO: 10841 - RNA, 20 nt, Homo sapiens
  source 1..20: mol_type = genomic RNA
ggaatgttaaatatctaaca

SEQ ID NO: 10842 - RNA, 20 nt, Homo sapiens
  source 1..20: mol_type = genomic RNA
gaatgttaaatatctaacag

SEQ ID NO: 10843 - RNA, 20 nt, Homo sapiens
  source 1..20: mol_type = genomic RNA
aatgttaaatatctaacagt

SEQ ID NO: 10844 - RNA, 20 nt, Homo sapiens
  source 1..20: mol_type = genomic RNA
atgttaaatatctaacagtt

SEQ ID NO: 10845 - RNA, 20 nt, Homo sapiens
  source 1..20: mol_type = genomic RNA
tgttaaatatctaacagttt

SEQ ID NO: 10846 - RNA, 20 nt, Homo sapiens
  source 1..20: mol_type = genomic RNA
gttaaatatctaacagttta

SEQ ID NO: 10847 - RNA, 20 nt, Homo sapiens
  source 1..20: mol_type = genomic RNA
ttaaatatctaacagtttag

SEQ ID NO: 10848 - RNA, 20 nt, Homo sapiens
  source 1..20: mol_type = genomic RNA
taaatatctaacagtttaga

SEQ ID NO: 10849 - RNA, 20 nt, Homo sapiens
  source 1..20: mol_type = genomic RNA
aaatatctaacagtttagaa

SEQ ID NO: 10850 - RNA, 20 nt, Homo sapiens
  source 1..20: mol_type = genomic RNA
aatatctaacagtttagaat

SEQ ID NO: 10851 - RNA, 20 nt, Homo sapiens
  source 1..20: mol_type = genomic RNA
atatctaacagtttagaatc

SEQ ID NO: 10852 - RNA, 20 nt, Homo sapiens
  source 1..20: mol_type = genomic RNA
tatctaacagtttagaatct

SEQ ID NO: 10853 - RNA, 20 nt, Homo sapiens
  source 1..20: mol_type = genomic RNA
atctaacagtttagaatctt

SEQ ID NO: 10854 - RNA, 20 nt, Homo sapiens
  source 1..20: mol_type = genomic RNA
tctaacagtttagaatctta

SEQ ID NO: 10855 - RNA, 20 nt, Homo sapiens
  source 1..20: mol_type = genomic RNA
ctaacagtttagaatcttat

SEQ ID NO: 10856 - RNA, 20 nt, Homo sapiens
  source 1..20: mol_type = genomic RNA
taacagtttagaatcttatg

SEQ ID NO: 10857 - RNA, 20 nt, Homo sapiens
  source 1..20: mol_type = genomic RNA
aacagtttagaatcttatgc

SEQ ID NO: 10858 - RNA, 20 nt, Homo sapiens
  source 1..20: mol_type = genomic RNA
acagtttagaatcttatgct

SEQ ID NO: 10859 - RNA, 20 nt, Homo sapiens
  source 1..20: mol_type = genomic RNA
cagtttagaatcttatgctt

SEQ ID NO: 10860 - RNA, 20 nt, Homo sapiens
  source 1..20: mol_type = genomic RNA
agtttagaatcttatgctta

SEQ ID NO: 10861 - RNA, 20 nt, Homo sapiens
  source 1..20: mol_type = genomic RNA
gtttagaatcttatgcttac

SEQ ID NO: 10862 - RNA, 20 nt, Homo sapiens
  source 1..20: mol_type = genomic RNA
tttagaatcttatgcttaca

SEQ ID NO: 10863 - RNA, 20 nt, Homo sapiens
  source 1..20: mol_type = genomic RNA
ttagaatcttatgcttacag

SEQ ID NO: 10864 - RNA, 20 nt, Homo sapiens
  source 1..20: mol_type = genomic RNA
tagaatcttatgcttacagt

SEQ ID NO: 10865 - RNA, 20 nt, Homo sapiens
  source 1..20: mol_type = genomic RNA
agaatcttatgcttacagtg

SEQ ID NO: 10866 - RNA, 20 nt, Homo sapiens
  source 1..20: mol_type = genomic RNA
gaatcttatgcttacagtgt

SEQ ID NO: 10867 - RNA, 20 nt, Homo sapiens
  source 1..20: mol_type = genomic RNA
aatcttatgcttacagtgtt

SEQ ID NO: 10868 - RNA, 20 nt, Homo sapiens
  source 1..20: mol_type = genomic RNA
atcttatgcttacagtgtta

SEQ ID NO: 10869 - RNA, 20 nt, Homo sapiens
  source 1..20: mol_type = genomic RNA
tcttatgcttacagtgttat

SEQ ID NO: 10870 - RNA, 20 nt, Homo sapiens
  source 1..20: mol_type = genomic RNA
cttatgcttacagtgttatc

SEQ ID NO: 10871 - RNA, 20 nt, Homo sapiens
  source 1..20: mol_type = genomic RNA
ttatgcttacagtgttatct

SEQ ID NO: 10872 - RNA, 20 nt, Homo sapiens
  source 1..20: mol_type = genomic RNA
tatgcttacagtgttatctg

SEQ ID NO: 10873 - RNA, 20 nt, Homo sapiens
  source 1..20: mol_type = genomic RNA
atgcttacagtgttatctgt

SEQ ID NO: 10874 - RNA, 20 nt, Homo sapiens
  source 1..20: mol_type = genomic RNA
tgcttacagtgttatctgtg

SEQ ID NO: 10875 - RNA, 20 nt, Homo sapiens
  source 1..20: mol_type = genomic RNA
gcttacagtgttatctgtga

SEQ ID NO: 10876 - RNA, 20 nt, Homo sapiens
  source 1..20: mol_type = genomic RNA
cttacagtgttatctgtgaa

SEQ ID NO: 10877 - RNA, 20 nt, Homo sapiens
  source 1..20: mol_type = genomic RNA
ttacagtgttatctgtgaat

SEQ ID NO: 10878 - RNA, 20 nt, Homo sapiens
  source 1..20: mol_type = genomic RNA
tacagtgttatctgtgaatg

SEQ ID NO: 10879 - RNA, 20 nt, Homo sapiens
  source 1..20: mol_type = genomic RNA
acagtgttatctgtgaatgc

SEQ ID NO: 10880 - RNA, 20 nt, Homo sapiens
  source 1..20: mol_type = genomic RNA
cagtgttatctgtgaatgca

SEQ ID NO: 10881 - RNA, 20 nt, Homo sapiens
  source 1..20: mol_type = genomic RNA
agtgttatctgtgaatgcac

SEQ ID NO: 10882 - RNA, 20 nt, Homo sapiens
  source 1..20: mol_type = genomic RNA
gtgttatctgtgaatgcaca

SEQ ID NO: 10883 - RNA, 20 nt, Homo sapiens
  source 1..20: mol_type = genomic RNA
tgttatctgtgaatgcacat

SEQ ID NO: 10884 - RNA, 20 nt, Homo sapiens
  source 1..20: mol_type = genomic RNA
gttatctgtgaatgcacata

SEQ ID NO: 10885 - RNA, 20 nt, Homo sapiens
  source 1..20: mol_type = genomic RNA
ttatctgtgaatgcacatat

SEQ ID NO: 10886 - RNA, 20 nt, Homo sapiens
  source 1..20: mol_type = genomic RNA
tatctgtgaatgcacatatt

SEQ ID NO: 10887 - RNA, 20 nt, Homo sapiens
  source 1..20: mol_type = genomic RNA
atctgtgaatgcacatatta

SEQ ID NO: 10888 - RNA, 20 nt, Homo sapiens
  source 1..20: mol_type = genomic RNA
tctgtgaatgcacatattaa

SEQ ID NO: 10889 - RNA, 20 nt, Homo sapiens
  source 1..20: mol_type = genomic RNA
ctgtgaatgcacatattaaa

SEQ ID NO: 10890 - RNA, 20 nt, Homo sapiens
  source 1..20: mol_type = genomic RNA
tgtgaatgcacatattaaat

SEQ ID NO: 10891 - RNA, 20 nt, Homo sapiens
  source 1..20: mol_type = genomic RNA
gtgaatgcacatattaaatg

SEQ ID NO: 10892 - RNA, 20 nt, Homo sapiens
  source 1..20: mol_type = genomic RNA
tgaatgcacatattaaatgt

SEQ ID NO: 10893 - RNA, 20 nt, Homo sapiens
  source 1..20: mol_type = genomic RNA
gaatgcacatattaaatgtc

SEQ ID NO: 10894 - RNA, 20 nt, Homo sapiens
  source 1..20: mol_type = genomic RNA
aatgcacatattaaatgtct

SEQ ID NO: 10895 - RNA, 20 nt, Homo sapiens
  source 1..20: mol_type = genomic RNA
atgcacatattaaatgtcta

SEQ ID NO: 10896 - RNA, 20 nt, Homo sapiens
  source 1..20: mol_type = genomic RNA
tgcacatattaaatgtctat

SEQ ID NO: 10897 - RNA, 20 nt, Homo sapiens
  source 1..20: mol_type = genomic RNA
gcacatattaaatgtctatg

SEQ ID NO: 10898 - RNA, 20 nt, Homo sapiens
  source 1..20: mol_type = genomic RNA
cacatattaaatgtctatgt

SEQ ID NO: 10899 - RNA, 20 nt, Homo sapiens
  source 1..20: mol_type = genomic RNA
acatattaaatgtctatgtt

SEQ ID NO: 10900 - RNA, 20 nt, Homo sapiens
  source 1..20: mol_type = genomic RNA
catattaaatgtctatgttc

SEQ ID NO: 10901 - RNA, 20 nt, Homo sapiens
  source 1..20: mol_type = genomic RNA
atattaaatgtctatgttct

SEQ ID NO: 10902 - RNA, 20 nt, Homo sapiens
  source 1..20: mol_type = genomic RNA
tattaaatgtctatgttctt

SEQ ID NO: 10903 - RNA, 20 nt, Homo sapiens
  source 1..20: mol_type = genomic RNA
attaaatgtctatgttcttg

SEQ ID NO: 10904 - RNA, 20 nt, Homo sapiens
  source 1..20: mol_type = genomic RNA
ttaaatgtctatgttcttgt

SEQ ID NO: 10905 - RNA, 20 nt, Homo sapiens
  source 1..20: mol_type = genomic RNA
taaatgtctatgttcttgtt

SEQ ID NO: 10906 - RNA, 20 nt, Homo sapiens
  source 1..20: mol_type = genomic RNA
aaatgtctatgttcttgttg

SEQ ID NO: 10907 - RNA, 20 nt, Homo sapiens
  source 1..20: mol_type = genomic RNA
aatgtctatgttcttgttgc

SEQ ID NO: 10908 - RNA, 20 nt, Homo sapiens
  source 1..20: mol_type = genomic RNA
atgtctatgttcttgttgct

SEQ ID NO: 10909 - RNA, 20 nt, Homo sapiens
  source 1..20: mol_type = genomic RNA
tgtctatgttcttgttgcta

SEQ ID NO: 10910 - RNA, 20 nt, Homo sapiens
  source 1..20: mol_type = genomic RNA
gtctatgttcttgttgctat

SEQ ID NO: 10911 - RNA, 20 nt, Homo sapiens
  source 1..20: mol_type = genomic RNA
tctatgttcttgttgctatg

SEQ ID NO: 10912 - RNA, 20 nt, Homo sapiens
  source 1..20: mol_type = genomic RNA
ctatgttcttgttgctatga

SEQ ID NO: 10913 - RNA, 20 nt, Homo sapiens
  source 1..20: mol_type = genomic RNA
tatgttcttgttgctatgag

SEQ ID NO: 10914 - RNA, 20 nt, Homo sapiens
  source 1..20: mol_type = genomic RNA
atgttcttgttgctatgagt

SEQ ID NO: 10915 - RNA, 20 nt, Homo sapiens
  source 1..20: mol_type = genomic RNA
tgttcttgttgctatgagtc

SEQ ID NO: 10916 - RNA, 20 nt, Homo sapiens
  source 1..20: mol_type = genomic RNA
gttcttgttgctatgagtca

SEQ ID NO: 10917 - RNA, 20 nt, Homo sapiens
  source 1..20: mol_type = genomic RNA
ttcttgttgctatgagtcaa

SEQ ID NO: 10918 - RNA, 20 nt, Homo sapiens
  source 1..20: mol_type = genomic RNA
tcttgttgctatgagtcaag

SEQ ID NO: 10919 - RNA, 20 nt, Homo sapiens
  source 1..20: mol_type = genomic RNA
cttgttgctatgagtcaagg

SEQ ID NO: 10920 - RNA, 20 nt, Homo sapiens
  source 1..20: mol_type = genomic RNA
ttgttgctatgagtcaagga

SEQ ID NO: 10921 - RNA, 20 nt, Homo sapiens
  source 1..20: mol_type = genomic RNA
tgttgctatgagtcaaggag

SEQ ID NO: 10922 - RNA, 20 nt, Homo sapiens
  source 1..20: mol_type = genomic RNA
gttgctatgagtcaaggagt

SEQ ID NO: 10923 - RNA, 20 nt, Homo sapiens
  source 1..20: mol_type = genomic RNA
ttgctatgagtcaaggagtg

SEQ ID NO: 10924 - RNA, 20 nt, Homo sapiens
  source 1..20: mol_type = genomic RNA
tgctatgagtcaaggagtgt

SEQ ID NO: 10925 - RNA, 20 nt, Homo sapiens
  source 1..20: mol_type = genomic RNA
gctatgagtcaaggagtgta

SEQ ID NO: 10926 - RNA, 20 nt, Homo sapiens
  source 1..20: mol_type = genomic RNA
ctatgagtcaaggagtgtaa

SEQ ID NO: 10927 - RNA, 20 nt, Homo sapiens
  source 1..20: mol_type = genomic RNA
tatgagtcaaggagtgtaac

SEQ ID NO: 10928 - RNA, 20 nt, Homo sapiens
  source 1..20: mol_type = genomic RNA
atgagtcaaggagtgtaacc

SEQ ID NO: 10929 - RNA, 20 nt, Homo sapiens
  source 1..20: mol_type = genomic RNA
tgagtcaaggagtgtaacct

SEQ ID NO: 10930 - RNA, 20 nt, Homo sapiens
  source 1..20: mol_type = genomic RNA
gagtcaaggagtgtaacctt

SEQ ID NO: 10931 - RNA, 20 nt, Homo sapiens
  source 1..20: mol_type = genomic RNA
agtcaaggagtgtaaccttc

SEQ ID NO: 10932 - RNA, 20 nt, Homo sapiens
  source 1..20: mol_type = genomic RNA
gtcaaggagtgtaaccttct

SEQ ID NO: 10933 - RNA, 20 nt, Homo sapiens
  source 1..20: mol_type = genomic RNA
tcaaggagtgtaaccttctc

SEQ ID NO: 10934 - RNA, 20 nt, Homo sapiens
  source 1..20: mol_type = genomic RNA
caaggagtgtaaccttctcc

SEQ ID NO: 10935 - RNA, 20 nt, Homo sapiens
  source 1..20: mol_type = genomic RNA
aaggagtgtaaccttctcct

SEQ ID NO: 10936 - RNA, 20 nt, Homo sapiens
  source 1..20: mol_type = genomic RNA
aggagtgtaaccttctcctt

SEQ ID NO: 10937 - RNA, 20 nt, Homo sapiens
  source 1..20: mol_type = genomic RNA
ggagtgtaaccttctccttt

SEQ ID NO: 10938 - RNA, 20 nt, Homo sapiens
  source 1..20: mol_type = genomic RNA
gagtgtaaccttctccttta

SEQ ID NO: 10939 - RNA, 20 nt, Homo sapiens
  source 1..20: mol_type = genomic RNA
agtgtaaccttctcctttac

SEQ ID NO: 10940 - RNA, 20 nt, Homo sapiens
  source 1..20: mol_type = genomic RNA
gtgtaaccttctcctttact

SEQ ID NO: 10941 - RNA, 20 nt, Homo sapiens
  source 1..20: mol_type = genomic RNA
tgtaaccttctcctttacta

SEQ ID NO: 10942 - RNA, 20 nt, Homo sapiens
  source 1..20: mol_type = genomic RNA
gtaaccttctcctttactat

SEQ ID NO: 10943 - RNA, 20 nt, Homo sapiens
  source 1..20: mol_type = genomic RNA
taaccttctcctttactatg

SEQ ID NO: 10944 - RNA, 20 nt, Homo sapiens
  source 1..20: mol_type = genomic RNA
aaccttctcctttactatgt

SEQ ID NO: 10945 - RNA, 20 nt, Homo sapiens
  source 1..20: mol_type = genomic RNA
accttctcctttactatgtt

SEQ ID NO: 10946 - RNA, 20 nt, Homo sapiens
  source 1..20: mol_type = genomic RNA
ccttctcctttactatgttg

SEQ ID NO: 10947 - RNA, 20 nt, Homo sapiens
  source 1..20: mol_type = genomic RNA
cttctcctttactatgttga

SEQ ID NO: 10948 - RNA, 20 nt, Homo sapiens
  source 1..20: mol_type = genomic RNA
ttctcctttactatgttgaa

SEQ ID NO: 10949 - RNA, 20 nt, Homo sapiens
  source 1..20: mol_type = genomic RNA
tctcctttactatgttgaat

SEQ ID NO: 10950 - RNA, 20 nt, Homo sapiens
  source 1..20: mol_type = genomic RNA
ctcctttactatgttgaatg

SEQ ID NO: 10951 - RNA, 20 nt, Homo sapiens
  source 1..20: mol_type = genomic RNA
tcctttactatgttgaatgt

SEQ ID NO: 10952 - RNA, 20 nt, Homo sapiens
  source 1..20: mol_type = genomic RNA
cctttactatgttgaatgta

SEQ ID NO: 10953 - RNA, 20 nt, Homo sapiens
  source 1..20: mol_type = genomic RNA
ctttactatgttgaatgtat

SEQ ID NO: 10954 - RNA, 20 nt, Homo sapiens
  source 1..20: mol_type = genomic RNA
tttactatgttgaatgtatt

SEQ ID NO: 10955 - RNA, 20 nt, Homo sapiens
  source 1..20: mol_type = genomic RNA
ttactatgttgaatgtattt

SEQ ID NO: 10956 - RNA, 20 nt, Homo sapiens
  source 1..20: mol_type = genomic RNA
tactatgttgaatgtatttt

SEQ ID NO: 10957 - RNA, 20 nt, Homo sapiens
  source 1..20: mol_type = genomic RNA
actatgttgaatgtattttt

SEQ ID NO: 10958 - RNA, 20 nt, Homo sapiens
  source 1..20: mol_type = genomic RNA
ctatgttgaatgtatttttt

SEQ ID NO: 10959 - RNA, 20 nt, Homo sapiens
  source 1..20: mol_type = genomic RNA
tatgttgaatgtattttttt

SEQ ID NO: 10960 - RNA, 20 nt, Homo sapiens
  source 1..20: mol_type = genomic RNA
atgttgaatgtatttttttc

SEQ ID NO: 10961 - RNA, 20 nt, Homo sapiens
  source 1..20: mol_type = genomic RNA
tgttgaatgtatttttttct

SEQ ID NO: 10962 - RNA, 20 nt, Homo sapiens
  source 1..20: mol_type = genomic RNA
gttgaatgtatttttttctg

SEQ ID NO: 10963 - RNA, 20 nt, Homo sapiens
  source 1..20: mol_type = genomic RNA
ttgaatgtatttttttctgg

SEQ ID NO: 10964 - RNA, 20 nt, Homo sapiens
  source 1..20: mol_type = genomic RNA
tgaatgtatttttttctgga

SEQ ID NO: 10965 - RNA, 20 nt, Homo sapiens
  source 1..20: mol_type = genomic RNA
gaatgtatttttttctggac

SEQ ID NO: 10966 - RNA, 20 nt, Homo sapiens
  source 1..20: mol_type = genomic RNA
aatgtatttttttctggaca

SEQ ID NO: 10967 - RNA, 20 nt, Homo sapiens
  source 1..20: mol_type = genomic RNA
atgtatttttttctggacaa

SEQ ID NO: 10968 - RNA, 20 nt, Homo sapiens
  source 1..20: mol_type = genomic RNA
tgtatttttttctggacaag

SEQ ID NO: 10969 - RNA, 20 nt, Homo sapiens
  source 1..20: mol_type = genomic RNA
gtatttttttctggacaagc

SEQ ID NO: 10970 - RNA, 20 nt, Homo sapiens
  source 1..20: mol_type = genomic RNA
tatttttttctggacaagct

SEQ ID NO: 10971 - RNA, 20 nt, Homo sapiens
  source 1..20: mol_type = genomic RNA
atttttttctggacaagctt

SEQ ID NO: 10972 - RNA, 20 nt, Homo sapiens
  source 1..20: mol_type = genomic RNA
tttttttctggacaagctta

SEQ ID NO: 10973 - RNA, 20 nt, Homo sapiens
  source 1..20: mol_type = genomic RNA
ttttttctggacaagcttac

SEQ ID NO: 10974 - RNA, 20 nt, Homo sapiens
  source 1..20: mol_type = genomic RNA
tttttctggacaagcttaca

SEQ ID NO: 10975 - RNA, 20 nt, Homo sapiens
  source 1..20: mol_type = genomic RNA
ttttctggacaagcttacat

SEQ ID NO: 10976 - RNA, 20 nt, Homo sapiens
  source 1..20: mol_type = genomic RNA
tttctggacaagcttacatc

SEQ ID NO: 10977 - RNA, 20 nt, Homo sapiens
  source 1..20: mol_type = genomic RNA
ttctggacaagcttacatct

SEQ ID NO: 10978 - RNA, 20 nt, Homo sapiens
  source 1..20: mol_type = genomic RNA
tctggacaagcttacatctt

SEQ ID NO: 10979 - RNA, 20 nt, Homo sapiens
  source 1..20: mol_type = genomic RNA
ctggacaagcttacatcttc

SEQ ID NO: 10980 - RNA, 20 nt, Homo sapiens
  source 1..20: mol_type = genomic RNA
tggacaagcttacatcttcc

SEQ ID NO: 10981 - RNA, 20 nt, Homo sapiens
  source 1..20: mol_type = genomic RNA
ggacaagcttacatcttcct

SEQ ID NO: 10982 - RNA, 20 nt, Homo sapiens
  source 1..20: mol_type = genomic RNA
gacaagcttacatcttcctc

SEQ ID NO: 10983 - RNA, 20 nt, Homo sapiens
  source 1..20: mol_type = genomic RNA
acaagcttacatcttcctca

SEQ ID NO: 10984 - RNA, 20 nt, Homo sapiens
  source 1..20: mol_type = genomic RNA
caagcttacatcttcctcag

SEQ ID NO: 10985 - RNA, 20 nt, Homo sapiens
  source 1..20: mol_type = genomic RNA
aagcttacatcttcctcagc

SEQ ID NO: 10986 - RNA, 20 nt, Homo sapiens
  source 1..20: mol_type = genomic RNA
agcttacatcttcctcagcc

SEQ ID NO: 10987 - RNA, 20 nt, Homo sapiens
  source 1..20: mol_type = genomic RNA
gcttacatcttcctcagcca

SEQ ID NO: 10988 - RNA, 20 nt, Homo sapiens
  source 1..20: mol_type = genomic RNA
cttacatcttcctcagccat

SEQ ID NO: 10989 - RNA, 20 nt, Homo sapiens
  source 1..20: mol_type = genomic RNA
ttacatcttcctcagccatc

SEQ ID NO: 10990 - RNA, 20 nt, Homo sapiens
  source 1..20: mol_type = genomic RNA
tacatcttcctcagccatct

SEQ ID NO: 10991 - RNA, 20 nt, Homo sapiens
  source 1..20: mol_type = genomic RNA
acatcttcctcagccatctt

SEQ ID NO: 10992 - RNA, 20 nt, Homo sapiens
  source 1..20: mol_type = genomic RNA
catcttcctcagccatcttt

SEQ ID NO: 10993 - RNA, 20 nt, Homo sapiens
  source 1..20: mol_type = genomic RNA
atcttcctcagccatctttg

SEQ ID NO: 10994 - RNA, 20 nt, Homo sapiens
  source 1..20: mol_type = genomic RNA
tcttcctcagccatctttgt

SEQ ID NO: 10995 - RNA, 20 nt, Homo sapiens
  source 1..20: mol_type = genomic RNA
cttcctcagccatctttgtg

SEQ ID NO: 10996 - RNA, 20 nt, Homo sapiens
  source 1..20: mol_type = genomic RNA
ttcctcagccatctttgtga

SEQ ID NO: 10997 - RNA, 20 nt, Homo sapiens
  source 1..20: mol_type = genomic RNA
tcctcagccatctttgtgag

SEQ ID NO: 10998 - RNA, 20 nt, Homo sapiens
  source 1..20: mol_type = genomic RNA
cctcagccatctttgtgagt

SEQ ID NO: 10999 - RNA, 20 nt, Homo sapiens
  source 1..20: mol_type = genomic RNA
ctcagccatctttgtgagtc

SEQ ID NO: 11000 - RNA, 20 nt, Homo sapiens
  source 1..20: mol_type = genomic RNA
tcagccatctttgtgagtcc

SEQ ID NO: 11001 - RNA, 20 nt, Homo sapiens
  source 1..20: mol_type = genomic RNA
cagccatctttgtgagtcct

SEQ ID NO: 11002 - RNA, 20 nt, Homo sapiens
  source 1..20: mol_type = genomic RNA
agccatctttgtgagtcctt

SEQ ID NO: 11003 - RNA, 20 nt, Homo sapiens
  source 1..20: mol_type = genomic RNA
gccatctttgtgagtccttc

SEQ ID NO: 11004 - RNA, 20 nt, Homo sapiens
  source 1..20: mol_type = genomic RNA
ccatctttgtgagtccttca

SEQ ID NO: 11005 - RNA, 20 nt, Homo sapiens
  source 1..20: mol_type = genomic RNA
catctttgtgagtccttcaa

SEQ ID NO: 11006 - RNA, 20 nt, Homo sapiens
  source 1..20: mol_type = genomic RNA
atctttgtgagtccttcaag

SEQ ID NO: 11007 - RNA, 20 nt, Homo sapiens
  source 1..20: mol_type = genomic RNA
tctttgtgagtccttcaaga

SEQ ID NO: 11008 - RNA, 20 nt, Homo sapiens
  source 1..20: mol_type = genomic RNA
ctttgtgagtccttcaagag

SEQ ID NO: 11009 - RNA, 20 nt, Homo sapiens
  source 1..20: mol_type = genomic RNA
tttgtgagtccttcaagagc

SEQ ID NO: 11010 - RNA, 20 nt, Homo sapiens
  source 1..20: mol_type = genomic RNA
ttgtgagtccttcaagagca

SEQ ID NO: 11011 - RNA, 20 nt, Homo sapiens
  source 1..20: mol_type = genomic RNA
tgtgagtccttcaagagcag

SEQ ID NO: 11012 - RNA, 20 nt, Homo sapiens
  source 1..20: mol_type = genomic RNA
gtgagtccttcaagagcagt

SEQ ID NO: 11013 - RNA, 20 nt, Homo sapiens
  source 1..20: mol_type = genomic RNA
tgagtccttcaagagcagtt

SEQ ID NO: 11014 - RNA, 20 nt, Homo sapiens
  source 1..20: mol_type = genomic RNA
gagtccttcaagagcagtta

SEQ ID NO: 11015 - RNA, 20 nt, Homo sapiens
  source 1..20: mol_type = genomic RNA
agtccttcaagagcagttat

SEQ ID NO: 11016 - RNA, 20 nt, Homo sapiens
  source 1..20: mol_type = genomic RNA
gtccttcaagagcagttatc

SEQ ID NO: 11017 - RNA, 20 nt, Homo sapiens
  source 1..20: mol_type = genomic RNA
tccttcaagagcagttatca

SEQ ID NO: 11018 - RNA, 20 nt, Homo sapiens
  source 1..20: mol_type = genomic RNA
ccttcaagagcagttatcaa

SEQ ID NO: 11019 - RNA, 20 nt, Homo sapiens
  source 1..20: mol_type = genomic RNA
cttcaagagcagttatcaat

SEQ ID NO: 11020 - RNA, 20 nt, Homo sapiens
  source 1..20: mol_type = genomic RNA
ttcaagagcagttatcaatt

SEQ ID NO: 11021 - RNA, 20 nt, Homo sapiens
  source 1..20: mol_type = genomic RNA
tcaagagcagttatcaattg

SEQ ID NO: 11022 - RNA, 20 nt, Homo sapiens
  source 1..20: mol_type = genomic RNA
caagagcagttatcaattgt

SEQ ID NO: 11023 - RNA, 20 nt, Homo sapiens
  source 1..20: mol_type = genomic RNA
aagagcagttatcaattgtt

SEQ ID NO: 11024 - RNA, 20 nt, Homo sapiens
  source 1..20: mol_type = genomic RNA
agagcagttatcaattgtta

SEQ ID NO: 11025 - RNA, 20 nt, Homo sapiens
  source 1..20: mol_type = genomic RNA
gagcagttatcaattgttag

SEQ ID NO: 11026 - RNA, 20 nt, Homo sapiens
  source 1..20: mol_type = genomic RNA
agcagttatcaattgttagt

SEQ ID NO: 11027 - RNA, 20 nt, Homo sapiens
  source 1..20: mol_type = genomic RNA
gcagttatcaattgttagtt

SEQ ID NO: 11028 - RNA, 20 nt, Homo sapiens
  source 1..20: mol_type = genomic RNA
cagttatcaattgttagtta

SEQ ID NO: 11029 - RNA, 20 nt, Homo sapiens
  source 1..20: mol_type = genomic RNA
agttatcaattgttagttag

SEQ ID NO: 11030 - RNA, 20 nt, Homo sapiens
  source 1..20: mol_type = genomic RNA
gttatcaattgttagttaga

SEQ ID NO: 11031 - RNA, 20 nt, Homo sapiens
  source 1..20: mol_type = genomic RNA
ttatcaattgttagttagat

SEQ ID NO: 11032 - RNA, 20 nt, Homo sapiens
  source 1..20: mol_type = genomic RNA
tatcaattgttagttagata

SEQ ID NO: 11033 - RNA, 20 nt, Homo sapiens
  source 1..20: mol_type = genomic RNA
atcaattgttagttagatat

SEQ ID NO: 11034 - RNA, 20 nt, Homo sapiens
  source 1..20: mol_type = genomic RNA
tcaattgttagttagatatt

SEQ ID NO: 11035 - RNA, 20 nt, Homo sapiens
  source 1..20: mol_type = genomic RNA
caattgttagttagatattt

SEQ ID NO: 11036 - RNA, 20 nt, Homo sapiens
  source 1..20: mol_type = genomic RNA
aattgttagttagatatttt

SEQ ID NO: 11037 - RNA, 20 nt, Homo sapiens
  source 1..20: mol_type = genomic RNA
attgttagttagatattttc

SEQ ID NO: 11038 - RNA, 20 nt, Homo sapiens
  source 1..20: mol_type = genomic RNA
ttgttagttagatattttct

SEQ ID NO: 11039 - RNA, 20 nt, Homo sapiens
  source 1..20: mol_type = genomic RNA
tgttagttagatattttcta

SEQ ID NO: 11040 - RNA, 20 nt, Homo sapiens
  source 1..20: mol_type = genomic RNA
gttagttagatattttctat

SEQ ID NO: 11041 - RNA, 20 nt, Homo sapiens
  source 1..20: mol_type = genomic RNA
ttagttagatattttctatt

SEQ ID NO: 11042 - RNA, 20 nt, Homo sapiens
  source 1..20: mol_type = genomic RNA
tagttagatattttctattt

SEQ ID NO: 11043 - RNA, 20 nt, Homo sapiens
  source 1..20: mol_type = genomic RNA
agttagatattttctattta

SEQ ID NO: 11044 - RNA, 20 nt, Homo sapiens
  source 1..20: mol_type = genomic RNA
gttagatattttctatttag

SEQ ID NO: 11045 - RNA, 20 nt, Homo sapiens
  source 1..20: mol_type = genomic RNA
ttagatattttctatttaga

SEQ ID NO: 11046 - RNA, 20 nt, Homo sapiens
  source 1..20: mol_type = genomic RNA
tagatattttctatttagag

SEQ ID NO: 11047 - RNA, 20 nt, Homo sapiens
  source 1..20: mol_type = genomic RNA
agatattttctatttagaga

SEQ ID NO: 11048 - RNA, 20 nt, Homo sapiens
  source 1..20: mol_type = genomic RNA
gatattttctatttagagaa

SEQ ID NO: 11049 - RNA, 20 nt, Homo sapiens
  source 1..20: mol_type = genomic RNA
atattttctatttagagaat

SEQ ID NO: 11050 - RNA, 20 nt, Homo sapiens
  source 1..20: mol_type = genomic RNA
tattttctatttagagaatg

SEQ ID NO: 11051 - RNA, 20 nt, Homo sapiens
  source 1..20: mol_type = genomic RNA
attttctatttagagaatgc

SEQ ID NO: 11052 - RNA, 20 nt, Homo sapiens
  source 1..20: mol_type = genomic RNA
ttttctatttagagaatgct

SEQ ID NO: 11053 - RNA, 20 nt, Homo sapiens
  source 1..20: mol_type = genomic RNA
tttctatttagagaatgctt

SEQ ID NO: 11054 - RNA, 20 nt, Homo sapiens
  source 1..20: mol_type = genomic RNA
ttctatttagagaatgctta

SEQ ID NO: 11055 - RNA, 20 nt, Homo sapiens
  source 1..20: mol_type = genomic RNA
tctatttagagaatgcttaa

SEQ ID NO: 11056 - RNA, 20 nt, Homo sapiens
  source 1..20: mol_type = genomic RNA
ctatttagagaatgcttaag

SEQ ID NO: 11057 - RNA, 20 nt, Homo sapiens
  source 1..20: mol_type = genomic RNA
tatttagagaatgcttaagg

SEQ ID NO: 11058 - RNA, 20 nt, Homo sapiens
  source 1..20: mol_type = genomic RNA
atttagagaatgcttaaggg

SEQ ID NO: 11059 - RNA, 20 nt, Homo sapiens
  source 1..20: mol_type = genomic RNA
tttagagaatgcttaaggga

SEQ ID NO: 11060 - RNA, 20 nt, Homo sapiens
  source 1..20: mol_type = genomic RNA
ttagagaatgcttaagggat

SEQ ID NO: 11061 - RNA, 20 nt, Homo sapiens
  source 1..20: mol_type = genomic RNA
tagagaatgcttaagggatt

SEQ ID NO: 11062 - RNA, 20 nt, Homo sapiens
  source 1..20: mol_type = genomic RNA
agagaatgcttaagggattc

SEQ ID NO: 11063 - RNA, 20 nt, Homo sapiens
  source 1..20: mol_type = genomic RNA
gagaatgcttaagggattcc

SEQ ID NO: 11064 - RNA, 20 nt, Homo sapiens
  source 1..20: mol_type = genomic RNA
agaatgcttaagggattcca

SEQ ID NO: 11065 - RNA, 20 nt, Homo sapiens
  source 1..20: mol_type = genomic RNA
gaatgcttaagggattccaa

SEQ ID NO: 11066 - RNA, 20 nt, Homo sapiens
  source 1..20: mol_type = genomic RNA
aatgcttaagggattccaat

SEQ ID NO: 11067 - RNA, 20 nt, Homo sapiens
  source 1..20: mol_type = genomic RNA
atgcttaagggattccaatc

SEQ ID NO: 11068 - RNA, 20 nt, Homo sapiens
  source 1..20: mol_type = genomic RNA
tgcttaagggattccaatcc

SEQ ID NO: 11069 - RNA, 20 nt, Homo sapiens
  source 1..20: mol_type = genomic RNA
gcttaagggattccaatccc

SEQ ID NO: 11070 - RNA, 20 nt, Homo sapiens
  source 1..20: mol_type = genomic RNA
cttaagggattccaatcccg

SEQ ID NO: 11071 - RNA, 20 nt, Homo sapiens
  source 1..20: mol_type = genomic RNA
ttaagggattccaatcccga

SEQ ID NO: 11072 - RNA, 20 nt, Homo sapiens
  source 1..20: mol_type = genomic RNA
taagggattccaatcccgat

SEQ ID NO: 11073 - RNA, 20 nt, Homo sapiens
  source 1..20: mol_type = genomic RNA
aagggattccaatcccgatc

SEQ ID NO: 11074 - RNA, 20 nt, Homo sapiens
  source 1..20: mol_type = genomic RNA
agggattccaatcccgatcc

SEQ ID NO: 11075 - RNA, 20 nt, Homo sapiens
  source 1..20: mol_type = genomic RNA
gggattccaatcccgatcca

SEQ ID NO: 11076 - RNA, 20 nt, Homo sapiens
  source 1..20: mol_type = genomic RNA
ggattccaatcccgatccaa

SEQ ID NO: 11077 - RNA, 20 nt, Homo sapiens
  source 1..20: mol_type = genomic RNA
gattccaatcccgatccaaa

SEQ ID NO: 11078 - RNA, 20 nt, Homo sapiens
  source 1..20: mol_type = genomic RNA
attccaatcccgatccaaat

SEQ ID NO: 11079 - RNA, 20 nt, Homo sapiens
  source 1..20: mol_type = genomic RNA
ttccaatcccgatccaaatc

SEQ ID NO: 11080 - RNA, 20 nt, Homo sapiens
  source 1..20: mol_type = genomic RNA
tccaatcccgatccaaatca

SEQ ID NO: 11081 - RNA, 20 nt, Homo sapiens
  source 1..20: mol_type = genomic RNA
ccaatcccgatccaaatcat

SEQ ID NO: 11082 - RNA, 20 nt, Homo sapiens
  source 1..20: mol_type = genomic RNA
caatcccgatccaaatcata

SEQ ID NO: 11083 - RNA, 20 nt, Homo sapiens
  source 1..20: mol_type = genomic RNA
aatcccgatccaaatcataa

SEQ ID NO: 11084 - RNA, 20 nt, Homo sapiens
  source 1..20: mol_type = genomic RNA
atcccgatccaaatcataat

SEQ ID NO: 11085 - RNA, 20 nt, Homo sapiens
  source 1..20: mol_type = genomic RNA
tcccgatccaaatcataatt

SEQ ID NO: 11086 - RNA, 20 nt, Homo sapiens
  source 1..20: mol_type = genomic RNA
cccgatccaaatcataattt

SEQ ID NO: 11087 - RNA, 20 nt, Homo sapiens
  source 1..20: mol_type = genomic RNA
ccgatccaaatcataatttg

SEQ ID NO: 11088 - RNA, 20 nt, Homo sapiens
  source 1..20: mol_type = genomic RNA
cgatccaaatcataatttgt

SEQ ID NO: 11089 - RNA, 20 nt, Homo sapiens
  source 1..20: mol_type = genomic RNA
gatccaaatcataatttgtt

SEQ ID NO: 11090 - RNA, 20 nt, Homo sapiens
  source 1..20: mol_type = genomic RNA
atccaaatcataatttgttc

SEQ ID NO: 11091 - RNA, 20 nt, Homo sapiens
  source 1..20: mol_type = genomic RNA
tccaaatcataatttgttct

SEQ ID NO: 11092 - RNA, 20 nt, Homo sapiens
  source 1..20: mol_type = genomic RNA
ccaaatcataatttgttctt

SEQ ID NO: 11093 - RNA, 20 nt, Homo sapiens
  source 1..20: mol_type = genomic RNA
caaatcataatttgttctta

SEQ ID NO: 11094 - RNA, 20 nt, Homo sapiens
  source 1..20: mol_type = genomic RNA
aaatcataatttgttcttaa

SEQ ID NO: 11095 - RNA, 20 nt, Homo sapiens
  source 1..20: mol_type = genomic RNA
aatcataatttgttcttaag

SEQ ID NO: 11096 - RNA, 20 nt, Homo sapiens
  source 1..20: mol_type = genomic RNA
atcataatttgttcttaagt

SEQ ID NO: 11097 - RNA, 20 nt, Homo sapiens
  source 1..20: mol_type = genomic RNA
tcataatttgttcttaagta

SEQ ID NO: 11098 - RNA, 20 nt, Homo sapiens
  source 1..20: mol_type = genomic RNA
cataatttgttcttaagtat

SEQ ID NO: 11099 - RNA, 20 nt, Homo sapiens
  source 1..20: mol_type = genomic RNA
ataatttgttcttaagtata

SEQ ID NO: 11100 - RNA, 20 nt, Homo sapiens
  source 1..20: mol_type = genomic RNA
taatttgttcttaagtatac

SEQ ID NO: 11101 - RNA, 20 nt, Homo sapiens
  source 1..20: mol_type = genomic RNA
aatttgttcttaagtatact

SEQ ID NO: 11102 - RNA, 20 nt, Homo sapiens
  source 1..20: mol_type = genomic RNA
atttgttcttaagtatactg

SEQ ID NO: 11103 - RNA, 20 nt, Homo sapiens
  source 1..20: mol_type = genomic RNA
tttgttcttaagtatactgg

SEQ ID NO: 11104 - RNA, 20 nt, Homo sapiens
  source 1..20: mol_type = genomic RNA
ttgttcttaagtatactggg

SEQ ID NO: 11105 - RNA, 20 nt, Homo sapiens
  source 1..20: mol_type = genomic RNA
tgttcttaagtatactgggc

SEQ ID NO: 11106 - RNA, 20 nt, Homo sapiens
  source 1..20: mol_type = genomic RNA
gttcttaagtatactgggca

SEQ ID NO: 11107 - RNA, 20 nt, Homo sapiens
  source 1..20: mol_type = genomic RNA
ttcttaagtatactgggcag

SEQ ID NO: 11108 - RNA, 20 nt, Homo sapiens
  source 1..20: mol_type = genomic RNA
tcttaagtatactgggcagg

SEQ ID NO: 11109 - RNA, 20 nt, Homo sapiens
  source 1..20: mol_type = genomic RNA
cttaagtatactgggcaggt

SEQ ID NO: 11110 - RNA, 20 nt, Homo sapiens
  source 1..20: mol_type = genomic RNA
ttaagtatactgggcaggtc

SEQ ID NO: 11111 - RNA, 20 nt, Homo sapiens
  source 1..20: mol_type = genomic RNA
taagtatactgggcaggtcc

SEQ ID NO: 11112 - RNA, 20 nt, Homo sapiens
  source 1..20: mol_type = genomic RNA
aagtatactgggcaggtccc

SEQ ID NO: 11113 - RNA, 20 nt, Homo sapiens
  source 1..20: mol_type = genomic RNA
agtatactgggcaggtcccc

SEQ ID NO: 11114 - RNA, 20 nt, Homo sapiens
  source 1..20: mol_type = genomic RNA
gtatactgggcaggtcccct

SEQ ID NO: 11115 - RNA, 20 nt, Homo sapiens
  source 1..20: mol_type = genomic RNA
tatactgggcaggtccccta

SEQ ID NO: 11116 - RNA, 20 nt, Homo sapiens
  source 1..20: mol_type = genomic RNA
atactgggcaggtcccctat

SEQ ID NO: 11117 - RNA, 20 nt, Homo sapiens
  source 1..20: mol_type = genomic RNA
tactgggcaggtcccctatt

SEQ ID NO: 11118 - RNA, 20 nt, Homo sapiens
  source 1..20: mol_type = genomic RNA
actgggcaggtcccctattt

SEQ ID NO: 11119 - RNA, 20 nt, Homo sapiens
  source 1..20: mol_type = genomic RNA
ctgggcaggtcccctatttt

SEQ ID NO: 11120 - RNA, 20 nt, Homo sapiens
  source 1..20: mol_type = genomic RNA
tgggcaggtcccctatttta

SEQ ID NO: 11121 - RNA, 20 nt, Homo sapiens
  source 1..20: mol_type = genomic RNA
gggcaggtcccctattttaa

SEQ ID NO: 11122 - RNA, 20 nt, Homo sapiens
  source 1..20: mol_type = genomic RNA
ggcaggtcccctattttaag

SEQ ID NO: 11123 - RNA, 20 nt, Homo sapiens
  source 1..20: mol_type = genomic RNA
gcaggtcccctattttaagt

SEQ ID NO: 11124 - RNA, 20 nt, Homo sapiens
  source 1..20: mol_type = genomic RNA
caggtcccctattttaagtc

SEQ ID NO: 11125 - RNA, 20 nt, Homo sapiens
  source 1..20: mol_type = genomic RNA
aggtcccctattttaagtca

SEQ ID NO: 11126 - RNA, 20 nt, Homo sapiens
  source 1..20: mol_type = genomic RNA
ggtcccctattttaagtcat

SEQ ID NO: 11127 - RNA, 20 nt, Homo sapiens
  source 1..20: mol_type = genomic RNA
gtcccctattttaagtcata

SEQ ID NO: 11128 - RNA, 20 nt, Homo sapiens
  source 1..20: mol_type = genomic RNA
tcccctattttaagtcataa

SEQ ID NO: 11129 - RNA, 20 nt, Homo sapiens
  source 1..20: mol_type = genomic RNA
cccctattttaagtcataat

SEQ ID NO: 11130 - RNA, 20 nt, Homo sapiens
  source 1..20: mol_type = genomic RNA
ccctattttaagtcataatt

SEQ ID NO: 11131 - RNA, 20 nt, Homo sapiens
  source 1..20: mol_type = genomic RNA
cctattttaagtcataattt

SEQ ID NO: 11132 - RNA, 20 nt, Homo sapiens
  source 1..20: mol_type = genomic RNA
ctattttaagtcataatttt

SEQ ID NO: 11133 - RNA, 20 nt, Homo sapiens
  source 1..20: mol_type = genomic RNA
tattttaagtcataattttg

SEQ ID NO: 11134 - RNA, 20 nt, Homo sapiens
  source 1..20: mol_type = genomic RNA
attttaagtcataattttgt

SEQ ID NO: 11135 - RNA, 20 nt, Homo sapiens
  source 1..20: mol_type = genomic RNA
ttttaagtcataattttgta

SEQ ID NO: 11136 - RNA, 20 nt, Homo sapiens
  source 1..20: mol_type = genomic RNA
tttaagtcataattttgtat

SEQ ID NO: 11137 - RNA, 20 nt, Homo sapiens
  source 1..20: mol_type = genomic RNA
ttaagtcataattttgtatt

SEQ ID NO: 11138 - RNA, 20 nt, Homo sapiens
  source 1..20: mol_type = genomic RNA
taagtcataattttgtattt

SEQ ID NO: 11139 - RNA, 20 nt, Homo sapiens
  source 1..20: mol_type = genomic RNA
aagtcataattttgtattta

SEQ ID NO: 11140 - RNA, 20 nt, Homo sapiens
  source 1..20: mol_type = genomic RNA
agtcataattttgtatttag

SEQ ID NO: 11141 - RNA, 20 nt, Homo sapiens
  source 1..20: mol_type = genomic RNA
gtcataattttgtatttagt

SEQ ID NO: 11142 - RNA, 20 nt, Homo sapiens
  source 1..20: mol_type = genomic RNA
tcataattttgtatttagtg

SEQ ID NO: 11143 - RNA, 20 nt, Homo sapiens
  source 1..20: mol_type = genomic RNA
cataattttgtatttagtgc

SEQ ID NO: 11144 - RNA, 20 nt, Homo sapiens
  source 1..20: mol_type = genomic RNA
ataattttgtatttagtgct

SEQ ID NO: 11145 - RNA, 20 nt, Homo sapiens
  source 1..20: mol_type = genomic RNA
taattttgtatttagtgctt

SEQ ID NO: 11146 - RNA, 20 nt, Homo sapiens
  source 1..20: mol_type = genomic RNA
aattttgtatttagtgcttt

SEQ ID NO: 11147 - RNA, 20 nt, Homo sapiens
  source 1..20: mol_type = genomic RNA
attttgtatttagtgctttc

SEQ ID NO: 11148 - RNA, 20 nt, Homo sapiens
  source 1..20: mol_type = genomic RNA
ttttgtatttagtgctttcc

SEQ ID NO: 11149 - RNA, 20 nt, Homo sapiens
  source 1..20: mol_type = genomic RNA
tttgtatttagtgctttcct

SEQ ID NO: 11150 - RNA, 20 nt, Homo sapiens
  source 1..20: mol_type = genomic RNA
ttgtatttagtgctttcctg

SEQ ID NO: 11151 - RNA, 20 nt, Homo sapiens
  source 1..20: mol_type = genomic RNA
tgtatttagtgctttcctgg

SEQ ID NO: 11152 - RNA, 20 nt, Homo sapiens
  source 1..20: mol_type = genomic RNA
gtatttagtgctttcctggc

SEQ ID NO: 11153 - RNA, 20 nt, Homo sapiens
  source 1..20: mol_type = genomic RNA
tatttagtgctttcctggct

SEQ ID NO: 11154 - RNA, 20 nt, Homo sapiens
  source 1..20: mol_type = genomic RNA
atttagtgctttcctggctc

SEQ ID NO: 11155 - RNA, 20 nt, Homo sapiens
  source 1..20: mol_type = genomic RNA
tttagtgctttcctggctct

SEQ ID NO: 11156 - RNA, 20 nt, Homo sapiens
  source 1..20: mol_type = genomic RNA
ttagtgctttcctggctctc

SEQ ID NO: 11157 - RNA, 20 nt, Homo sapiens
  source 1..20: mol_type = genomic RNA
tagtgctttcctggctctca

SEQ ID NO: 11158 - RNA, 20 nt, Homo sapiens
  source 1..20: mol_type = genomic RNA
agtgctttcctggctctcag

SEQ ID NO: 11159 - RNA, 20 nt, Homo sapiens
  source 1..20: mol_type = genomic RNA
gtgctttcctggctctcaga

SEQ ID NO: 11160 - RNA, 20 nt, Homo sapiens
  source 1..20: mol_type = genomic RNA
tgctttcctggctctcagag

SEQ ID NO: 11161 - RNA, 20 nt, Homo sapiens
  source 1..20: mol_type = genomic RNA
gctttcctggctctcagaga

SEQ ID NO: 11162 - RNA, 20 nt, Homo sapiens
  source 1..20: mol_type = genomic RNA
ctttcctggctctcagagag

SEQ ID NO: 11163 - RNA, 20 nt, Homo sapiens
  source 1..20: mol_type = genomic RNA
tttcctggctctcagagagt

SEQ ID NO: 11164 - RNA, 20 nt, Homo sapiens
  source 1..20: mol_type = genomic RNA
ttcctggctctcagagagta

SEQ ID NO: 11165 - RNA, 20 nt, Homo sapiens
  source 1..20: mol_type = genomic RNA
tcctggctctcagagagtat

SEQ ID NO: 11166 - RNA, 20 nt, Homo sapiens
  source 1..20: mol_type = genomic RNA
cctggctctcagagagtatt

SEQ ID NO: 11167 - RNA, 20 nt, Homo sapiens
  source 1..20: mol_type = genomic RNA
ctggctctcagagagtatta

SEQ ID NO: 11168 - RNA, 20 nt, Homo sapiens
  source 1..20: mol_type = genomic RNA
tggctctcagagagtattaa

SEQ ID NO: 11169 - RNA, 20 nt, Homo sapiens
  source 1..20: mol_type = genomic RNA
ggctctcagagagtattaat

SEQ ID NO: 11170 - RNA, 20 nt, Homo sapiens
  source 1..20: mol_type = genomic RNA
gctctcagagagtattaata

SEQ ID NO: 11171 - RNA, 20 nt, Homo sapiens
  source 1..20: mol_type = genomic RNA
ctctcagagagtattaatat

SEQ ID NO: 11172 - RNA, 20 nt, Homo sapiens
  source 1..20: mol_type = genomic RNA
tctcagagagtattaatatt

SEQ ID NO: 11173 - RNA, 20 nt, Homo sapiens
  source 1..20: mol_type = genomic RNA
ctcagagagtattaatattg

SEQ ID NO: 11174 - RNA, 20 nt, Homo sapiens
  source 1..20: mol_type = genomic RNA
tcagagagtattaatattga

SEQ ID NO: 11175 - RNA, 20 nt, Homo sapiens
  source 1..20: mol_type = genomic RNA
cagagagtattaatattgat

SEQ ID NO: 11176 - RNA, 20 nt, Homo sapiens
  source 1..20: mol_type = genomic RNA
agagagtattaatattgata

SEQ ID NO: 11177 - RNA, 20 nt, Homo sapiens
  source 1..20: mol_type = genomic RNA
gagagtattaatattgatat

SEQ ID NO: 11178 - RNA, 20 nt, Homo sapiens
  source 1..20: mol_type = genomic RNA
agagtattaatattgatatt

SEQ ID NO: 11179 - RNA, 20 nt, Homo sapiens
  source 1..20: mol_type = genomic RNA
gagtattaatattgatatta

SEQ ID NO: 11180 - RNA, 20 nt, Homo sapiens
  source 1..20: mol_type = genomic RNA
agtattaatattgatattaa

SEQ ID NO: 11181 - RNA, 20 nt, Homo sapiens
  source 1..20: mol_type = genomic RNA
gtattaatattgatattaat

SEQ ID NO: 11182 - RNA, 20 nt, Homo sapiens
  source 1..20: mol_type = genomic RNA
tattaatattgatattaata

SEQ ID NO: 11183 - RNA, 20 nt, Homo sapiens
  source 1..20: mol_type = genomic RNA
attaatattgatattaataa

SEQ ID NO: 11184 - RNA, 20 nt, Homo sapiens
  source 1..20: mol_type = genomic RNA
ttaatattgatattaataat

SEQ ID NO: 11185 - RNA, 20 nt, Homo sapiens
  source 1..20: mol_type = genomic RNA
taatattgatattaataata

SEQ ID NO: 11186 - RNA, 20 nt, Homo sapiens
  source 1..20: mol_type = genomic RNA
aatattgatattaataatat

SEQ ID NO: 11187 - RNA, 20 nt, Homo sapiens
  source 1..20: mol_type = genomic RNA
atattgatattaataatata

SEQ ID NO: 11188 - RNA, 20 nt, Homo sapiens
  source 1..20: mol_type = genomic RNA
tattgatattaataatatag

SEQ ID NO: 11189 - RNA, 20 nt, Homo sapiens
  source 1..20: mol_type = genomic RNA
attgatattaataatatagt

SEQ ID NO: 11190 - RNA, 20 nt, Homo sapiens
  source 1..20: mol_type = genomic RNA
ttgatattaataatatagtt

SEQ ID NO: 11191 - RNA, 20 nt, Homo sapiens
  source 1..20: mol_type = genomic RNA
tgatattaataatatagtta

SEQ ID NO: 11192 - RNA, 20 nt, Homo sapiens
  source 1..20: mol_type = genomic RNA
gatattaataatatagttaa

SEQ ID NO: 11193 - RNA, 20 nt, Homo sapiens
  source 1..20: mol_type = genomic RNA
atattaataatatagttaat

SEQ ID NO: 11194 - RNA, 20 nt, Homo sapiens
  source 1..20: mol_type = genomic RNA
tattaataatatagttaata

SEQ ID NO: 11195 - RNA, 20 nt, Homo sapiens
  source 1..20: mol_type = genomic RNA
attaataatatagttaatag

SEQ ID NO: 11196 - RNA, 20 nt, Homo sapiens
  source 1..20: mol_type = genomic RNA
ttaataatatagttaatagt

SEQ ID NO: 11197 - RNA, 20 nt, Homo sapiens
  source 1..20: mol_type = genomic RNA
taataatatagttaatagta

SEQ ID NO: 11198 - RNA, 20 nt, Homo sapiens
  source 1..20: mol_type = genomic RNA
aataatatagttaatagtaa

SEQ ID NO: 11199 - RNA, 20 nt, Homo sapiens
  source 1..20: mol_type = genomic RNA
ataatatagttaatagtaat

SEQ ID NO: 11200 - RNA, 20 nt, Homo sapiens
  source 1..20: mol_type = genomic RNA
taatatagttaatagtaata

SEQ ID NO: 11201 - RNA, 20 nt, Homo sapiens
  source 1..20: mol_type = genomic RNA
aatatagttaatagtaatat

SEQ ID NO: 11202 - RNA, 20 nt, Homo sapiens
  source 1..20: mol_type = genomic RNA
atatagttaatagtaatatt

SEQ ID NO: 11203 - RNA, 20 nt, Homo sapiens
  source 1..20: mol_type = genomic RNA
tatagttaatagtaatattg

SEQ ID NO: 11204 - RNA, 20 nt, Homo sapiens
  source 1..20: mol_type = genomic RNA
atagttaatagtaatattgc

SEQ ID NO: 11205 - RNA, 20 nt, Homo sapiens
  source 1..20: mol_type = genomic RNA
tagttaatagtaatattgct

SEQ ID NO: 11206 - RNA, 20 nt, Homo sapiens
  source 1..20: mol_type = genomic RNA
agttaatagtaatattgcta

SEQ ID NO: 11207 - RNA, 20 nt, Homo sapiens
  source 1..20: mol_type = genomic RNA
gttaatagtaatattgctat

SEQ ID NO: 11208 - RNA, 20 nt, Homo sapiens
  source 1..20: mol_type = genomic RNA
ttaatagtaatattgctatt

SEQ ID NO: 11209 - RNA, 20 nt, Homo sapiens
  source 1..20: mol_type = genomic RNA
taatagtaatattgctattt

SEQ ID NO: 11210 - RNA, 20 nt, Homo sapiens
  source 1..20: mol_type = genomic RNA
aatagtaatattgctattta

SEQ ID NO: 11211 - RNA, 20 nt, Homo sapiens
  source 1..20: mol_type = genomic RNA
atagtaatattgctatttac

SEQ ID NO: 11212 - RNA, 20 nt, Homo sapiens
  source 1..20: mol_type = genomic RNA
tagtaatattgctatttaca

SEQ ID NO: 11213 - RNA, 20 nt, Homo sapiens
  source 1..20: mol_type = genomic RNA
agtaatattgctatttacat

SEQ ID NO: 11214 - RNA, 20 nt, Homo sapiens
  source 1..20: mol_type = genomic RNA
gtaatattgctatttacatg

SEQ ID NO: 11215 - RNA, 20 nt, Homo sapiens
  source 1..20: mol_type = genomic RNA
taatattgctatttacatgg

SEQ ID NO: 11216 - RNA, 20 nt, Homo sapiens
  source 1..20: mol_type = genomic RNA
aatattgctatttacatgga

SEQ ID NO: 11217 - RNA, 20 nt, Homo sapiens
  source 1..20: mol_type = genomic RNA
atattgctatttacatggaa

SEQ ID NO: 11218 - RNA, 20 nt, Homo sapiens
  source 1..20: mol_type = genomic RNA
tattgctatttacatggaaa

SEQ ID NO: 11219 - RNA, 20 nt, Homo sapiens
  source 1..20: mol_type = genomic RNA
attgctatttacatggaaac

SEQ ID NO: 11220 - RNA, 20 nt, Homo sapiens
  source 1..20: mol_type = genomic RNA
ttgctatttacatggaaaca

SEQ ID NO: 11221 - RNA, 20 nt, Homo sapiens
  source 1..20: mol_type = genomic RNA
tgctatttacatggaaacaa

SEQ ID NO: 11222 - RNA, 20 nt, Homo sapiens
  source 1..20: mol_type = genomic RNA
gctatttacatggaaacaaa

SEQ ID NO: 11223 - RNA, 20 nt, Homo sapiens
  source 1..20: mol_type = genomic RNA
ctatttacatggaaacaaat

SEQ ID NO: 11224 - RNA, 20 nt, Homo sapiens
  source 1..20: mol_type = genomic RNA
tatttacatggaaacaaata

SEQ ID NO: 11225 - RNA, 20 nt, Homo sapiens
  source 1..20: mol_type = genomic RNA
atttacatggaaacaaataa

SEQ ID NO: 11226 - RNA, 20 nt, Homo sapiens
  source 1..20: mol_type = genomic RNA
tttacatggaaacaaataaa

SEQ ID NO: 11227 - RNA, 20 nt, Homo sapiens
  source 1..20: mol_type = genomic RNA
ttacatggaaacaaataaaa

SEQ ID NO: 11228 - RNA, 20 nt, Homo sapiens
  source 1..20: mol_type = genomic RNA
tacatggaaacaaataaaag

SEQ ID NO: 11229 - RNA, 20 nt, Homo sapiens
  source 1..20: mol_type = genomic RNA
acatggaaacaaataaaaga

SEQ ID NO: 11230 - RNA, 20 nt, Homo sapiens
  source 1..20: mol_type = genomic RNA
catggaaacaaataaaagat

SEQ ID NO: 11231 - RNA, 20 nt, Homo sapiens
  source 1..20: mol_type = genomic RNA
atggaaacaaataaaagatc

SEQ ID NO: 11232 - RNA, 20 nt, Homo sapiens
  source 1..20: mol_type = genomic RNA
tggaaacaaataaaagatct

SEQ ID NO: 11233 - RNA, 20 nt, Homo sapiens
  source 1..20: mol_type = genomic RNA
ggaaacaaataaaagatctc

SEQ ID NO: 11234 - RNA, 20 nt, Homo sapiens
  source 1..20: mol_type = genomic RNA
gaaacaaataaaagatctca

SEQ ID NO: 11235 - RNA, 20 nt, Homo sapiens
  source 1..20: mol_type = genomic RNA
aaacaaataaaagatctcag

SEQ ID NO: 11236 - RNA, 20 nt, Homo sapiens
  source 1..20: mol_type = genomic RNA
aacaaataaaagatctcaga

SEQ ID NO: 11237 - RNA, 20 nt, Homo sapiens
  source 1..20: mol_type = genomic RNA
acaaataaaagatctcagaa

SEQ ID NO: 11238 - RNA, 20 nt, Homo sapiens
  source 1..20: mol_type = genomic RNA
caaataaaagatctcagaat

SEQ ID NO: 11239 - RNA, 20 nt, Homo sapiens
  source 1..20: mol_type = genomic RNA
aaataaaagatctcagaatt

SEQ ID NO: 11240 - RNA, 20 nt, Homo sapiens
  source 1..20: mol_type = genomic RNA
aataaaagatctcagaattc

SEQ ID NO: 11241 - RNA, 20 nt, Homo sapiens
  source 1..20: mol_type = genomic RNA
ataaaagatctcagaattca

SEQ ID NO: 11242 - RNA, 20 nt, Homo sapiens
  source 1..20: mol_type = genomic RNA
taaaagatctcagaattcac

SEQ ID NO: 11243 - RNA, 20 nt, Homo sapiens
  source 1..20: mol_type = genomic RNA
aaaagatctcagaattcact

SEQ ID NO: 11244 - RNA, 20 nt, Homo sapiens
  source 1..20: mol_type = genomic RNA
aaagatctcagaattcacta

SEQ ID NO: 11245 - RNA, 20 nt, Homo sapiens
  source 1..20: mol_type = genomic RNA
aagatctcagaattcactaa

SEQ ID NO: 11246 - RNA, 20 nt, Homo sapiens
  source 1..20: mol_type = genomic RNA
agatctcagaattcactaaa

SEQ ID NO: 11247 - RNA, 20 nt, Homo sapiens
  source 1..20: mol_type = genomic RNA
gatctcagaattcactaaaa

SEQ ID NO: 11248 - RNA, 20 nt, Homo sapiens
  source 1..20: mol_type = genomic RNA
atctcagaattcactaaaaa

SEQ ID NO: 11249 - RNA, 20 nt, Homo sapiens
  source 1..20: mol_type = genomic RNA
tctcagaattcactaaaaaa

SEQ ID NO: 11250 - RNA, 20 nt, Homo sapiens
  source 1..20: mol_type = genomic RNA
ctcagaattcactaaaaaaa

SEQ ID NO: 11251 - RNA, 20 nt, Homo sapiens
  source 1..20: mol_type = genomic RNA
tcagaattcactaaaaaaaa

SEQ ID NO: 11252 - RNA, 20 nt, Homo sapiens
  source 1..20: mol_type = genomic RNA
cagaattcactaaaaaaaaa

SEQ ID NO: 11253 - RNA, 20 nt, Homo sapiens
  source 1..20: mol_type = genomic RNA
agaattcactaaaaaaaaaa

SEQ ID NO: 11254 - RNA, 20 nt, Homo sapiens
  source 1..20: mol_type = genomic RNA
gaattcactaaaaaaaaaaa

SEQ ID NO: 11255 - RNA, 20 nt, Homo sapiens
  source 1..20: mol_type = genomic RNA
tttcgctttcattttgggcc

SEQ ID NO: 11256 - RNA, 20 nt, Homo sapiens
  source 1..20: mol_type = genomic RNA
ttcgctttcattttgggccg

SEQ ID NO: 11257 - RNA, 20 nt, Homo sapiens
  source 1..20: mol_type = genomic RNA
tcgctttcattttgggccga

SEQ ID NO: 11258 - RNA, 20 nt, Homo sapiens
  source 1..20: mol_type = genomic RNA
cgctttcattttgggccgag

SEQ ID NO: 11259 - RNA, 20 nt, Homo sapiens
  source 1..20: mol_type = genomic RNA
gctttcattttgggccgagc

SEQ ID NO: 11260 - RNA, 20 nt, Homo sapiens
  source 1..20: mol_type = genomic RNA
ctttcattttgggccgagct

SEQ ID NO: 11261 - RNA, 20 nt, Homo sapiens
  source 1..20: mol_type = genomic RNA
tttcattttgggccgagctg

SEQ ID NO: 11262 - RNA, 20 nt, Homo sapiens
  source 1..20: mol_type = genomic RNA
ttcattttgggccgagctgg

SEQ ID NO: 11263 - RNA, 20 nt, Homo sapiens
  source 1..20: mol_type = genomic RNA
tcattttgggccgagctgga

SEQ ID NO: 11264 - RNA, 20 nt, Homo sapiens
  source 1..20: mol_type = genomic RNA
cattttgggccgagctggag

SEQ ID NO: 11265 - RNA, 20 nt, Homo sapiens
  source 1..20: mol_type = genomic RNA
attttgggccgagctggagg

SEQ ID NO: 11266 - RNA, 20 nt, Homo sapiens
  source 1..20: mol_type = genomic RNA
ttttgggccgagctggaggc

SEQ ID NO: 11267 - RNA, 20 nt, Homo sapiens
  source 1..20: mol_type = genomic RNA
tttgggccgagctggaggcg

SEQ ID NO: 11268 - RNA, 20 nt, Homo sapiens
  source 1..20: mol_type = genomic RNA
ttgggccgagctggaggcgg

SEQ ID NO: 11269 - RNA, 20 nt, Homo sapiens
  source 1..20: mol_type = genomic RNA
tgggccgagctggaggcggc

SEQ ID NO: 11270 - RNA, 20 nt, Homo sapiens
  source 1..20: mol_type = genomic RNA
gggccgagctggaggcggcg

SEQ ID NO: 11271 - RNA, 20 nt, Homo sapiens
  source 1..20: mol_type = genomic RNA
ggccgagctggaggcggcgg

SEQ ID NO: 11272 - RNA, 20 nt, Homo sapiens
  source 1..20: mol_type = genomic RNA
gccgagctggaggcggcggg

SEQ ID NO: 11273 - RNA, 20 nt, Homo sapiens
  source 1..20: mol_type = genomic RNA
ccgagctggaggcggcgggg

SEQ ID NO: 11274 - RNA, 20 nt, Homo sapiens
  source 1..20: mol_type = genomic RNA
cgagctggaggcggcggggc

SEQ ID NO: 11275 - RNA, 20 nt, Homo sapiens
  source 1..20: mol_type = genomic RNA
gagctggaggcggcggggcc

SEQ ID NO: 11276 - RNA, 20 nt, Homo sapiens
  source 1..20: mol_type = genomic RNA
agctggaggcggcggggccg

SEQ ID NO: 11277 - RNA, 20 nt, Homo sapiens
  source 1..20: mol_type = genomic RNA
gctggaggcggcggggccgt

SEQ ID NO: 11278 - RNA, 20 nt, Homo sapiens
  source 1..20: mol_type = genomic RNA
ctggaggcggcggggccgtc

SEQ ID NO: 11279 - RNA, 20 nt, Homo sapiens
  source 1..20: mol_type = genomic RNA
tggaggcggcggggccgtcc

SEQ ID NO: 11280 - RNA, 20 nt, Homo sapiens
  source 1..20: mol_type = genomic RNA
ggaggcggcggggccgtccc

SEQ ID NO: 11281 - RNA, 20 nt, Homo sapiens
  source 1..20: mol_type = genomic RNA
gaggcggcggggccgtcccg

SEQ ID NO: 11282 - RNA, 20 nt, Homo sapiens
  source 1..20: mol_type = genomic RNA
aggcggcggggccgtcccgg

SEQ ID NO: 11283 - RNA, 20 nt, Homo sapiens
  source 1..20: mol_type = genomic RNA
ggcggcggggccgtcccgga

SEQ ID NO: 11284 - RNA, 20 nt, Homo sapiens
  source 1..20: mol_type = genomic RNA
gcggcggggccgtcccggaa

SEQ ID NO: 11285 - RNA, 20 nt, Homo sapiens
  source 1..20: mol_type = genomic RNA
cggcggggccgtcccggaac

SEQ ID NO: 11286 - RNA, 20 nt, Homo sapiens
  source 1..20: mol_type = genomic RNA
ggcggggccgtcccggaacg

SEQ ID NO: 11287 - RNA, 20 nt, Homo sapiens
  source 1..20: mol_type = genomic RNA
gcggggccgtcccggaacgg

SEQ ID NO: 11288 - RNA, 20 nt, Homo sapiens
  source 1..20: mol_type = genomic RNA
cggggccgtcccggaacggc

SEQ ID NO: 11289 - RNA, 20 nt, Homo sapiens
  source 1..20: mol_type = genomic RNA
ggggccgtcccggaacggct

SEQ ID NO: 11290 - RNA, 20 nt, Homo sapiens
  source 1..20: mol_type = genomic RNA
gggccgtcccggaacggctg

SEQ ID NO: 11291 - RNA, 20 nt, Homo sapiens
  source 1..20: mol_type = genomic RNA
ggccgtcccggaacggctgc

SEQ ID NO: 11292 - RNA, 20 nt, Homo sapiens
  source 1..20: mol_type = genomic RNA
gccgtcccggaacggctgcg

SEQ ID NO: 11293 - RNA, 20 nt, Homo sapiens
  source 1..20: mol_type = genomic RNA
ccgtcccggaacggctgcgg

SEQ ID NO: 11294 - RNA, 20 nt, Homo sapiens
  source 1..20: mol_type = genomic RNA
cgtcccggaacggctgcggc

SEQ ID NO: 11295 - RNA, 20 nt, Homo sapiens
  source 1..20: mol_type = genomic RNA
gtcccggaacggctgcggcc

SEQ ID NO: 11296 - RNA, 20 nt, Homo sapiens
  source 1..20: mol_type = genomic RNA
tcccggaacggctgcggccg

SEQ ID NO: 11297 - RNA, 20 nt, Homo sapiens
  source 1..20: mol_type = genomic RNA
cccggaacggctgcggccgg

SEQ ID NO: 11298 - RNA, 20 nt, Homo sapiens
  source 1..20: mol_type = genomic RNA
ccggaacggctgcggccggg

SEQ ID NO: 11299 - RNA, 20 nt, Homo sapiens
  source 1..20: mol_type = genomic RNA
cggaacggctgcggccgggc

SEQ ID NO: 11300 - RNA, 20 nt, Homo sapiens
  source 1..20: mol_type = genomic RNA
ggaacggctgcggccgggca

SEQ ID NO: 11301 - RNA, 20 nt, Homo sapiens
  source 1..20: mol_type = genomic RNA
gaacggctgcggccgggcac

SEQ ID NO: 11302 - RNA, 20 nt, Homo sapiens
  source 1..20: mol_type = genomic RNA
aacggctgcggccgggcacc

SEQ ID NO: 11303 - RNA, 20 nt, Homo sapiens
  source 1..20: mol_type = genomic RNA
acggctgcggccgggcaccc

SEQ ID NO: 11304 - RNA, 20 nt, Homo sapiens
  source 1..20: mol_type = genomic RNA
cggctgcggccgggcacccc

SEQ ID NO: 11305 - RNA, 20 nt, Homo sapiens
  source 1..20: mol_type = genomic RNA
ggctgcggccgggcaccccg

SEQ ID NO: 11306 - RNA, 20 nt, Homo sapiens
  source 1..20: mol_type = genomic RNA
gctgcggccgggcaccccgg

SEQ ID NO: 11307 - RNA, 20 nt, Homo sapiens
  source 1..20: mol_type = genomic RNA
ctgcggccgggcaccccggg

SEQ ID NO: 11308 - RNA, 20 nt, Homo sapiens
  source 1..20: mol_type = genomic RNA
tgcggccgggcaccccggga

SEQ ID NO: 11309 - RNA, 20 nt, Homo sapiens
  source 1..20: mol_type = genomic RNA
gcggccgggcaccccgggag

SEQ ID NO: 11310 - RNA, 20 nt, Homo sapiens
  source 1..20: mol_type = genomic RNA
cggccgggcaccccgggagt

SEQ ID NO: 11311 - RNA, 20 nt, Homo sapiens
  source 1..20: mol_type = genomic RNA
ggccgggcaccccgggagtt

SEQ ID NO: 11312 - RNA, 20 nt, Homo sapiens
  source 1..20: mol_type = genomic RNA
gccgggcaccccgggagtta

SEQ ID NO: 11313 - RNA, 20 nt, Homo sapiens
  source 1..20: mol_type = genomic RNA
ccgggcaccccgggagttaa

SEQ ID NO: 11314 - RNA, 20 nt, Homo sapiens
  source 1..20: mol_type = genomic RNA
cgggcaccccgggagttaat

SEQ ID NO: 11315 - RNA, 20 nt, Homo sapiens
  source 1..20: mol_type = genomic RNA
gggcaccccgggagttaatc

SEQ ID NO: 11316 - RNA, 20 nt, Homo sapiens
  source 1..20: mol_type = genomic RNA
ggcaccccgggagttaatcc

SEQ ID NO: 11317 - RNA, 20 nt, Homo sapiens
  source 1..20: mol_type = genomic RNA
gcaccccgggagttaatccg

SEQ ID NO: 11318 - RNA, 20 nt, Homo sapiens
  source 1..20: mol_type = genomic RNA
caccccgggagttaatccga

SEQ ID NO: 11319 - RNA, 20 nt, Homo sapiens
  source 1..20: mol_type = genomic RNA
accccgggagttaatccgaa

SEQ ID NO: 11320 - RNA, 20 nt, Homo sapiens
  source 1..20: mol_type = genomic RNA
ccccgggagttaatccgaaa

SEQ ID NO: 11321 - RNA, 20 nt, Homo sapiens
  source 1..20: mol_type = genomic RNA
cccgggagttaatccgaaag

SEQ ID NO: 11322 - RNA, 20 nt, Homo sapiens
  source 1..20: mol_type = genomic RNA
ccgggagttaatccgaaagc

SEQ ID NO: 11323 - RNA, 20 nt, Homo sapiens
  source 1..20: mol_type = genomic RNA
cgggagttaatccgaaagcg

SEQ ID NO: 11324 - RNA, 20 nt, Homo sapiens
  source 1..20: mol_type = genomic RNA
gggagttaatccgaaagcgc

SEQ ID NO: 11325 - RNA, 20 nt, Homo sapiens
  source 1..20: mol_type = genomic RNA
ggagttaatccgaaagcgcc

SEQ ID NO: 11326 - RNA, 20 nt, Homo sapiens
  source 1..20: mol_type = genomic RNA
gagttaatccgaaagcgccg

SEQ ID NO: 11327 - RNA, 20 nt, Homo sapiens
  source 1..20: mol_type = genomic RNA
agttaatccgaaagcgccgc

SEQ ID NO: 11328 - RNA, 20 nt, Homo sapiens
  source 1..20: mol_type = genomic RNA
gttaatccgaaagcgccgca

SEQ ID NO: 11329 - RNA, 20 nt, Homo sapiens
  source 1..20: mol_type = genomic RNA
ttaatccgaaagcgccgcaa

SEQ ID NO: 11330 - RNA, 20 nt, Homo sapiens
  source 1..20: mol_type = genomic RNA
taatccgaaagcgccgcaag

SEQ ID NO: 11331 - RNA, 20 nt, Homo sapiens
  source 1..20: mol_type = genomic RNA
aatccgaaagcgccgcaagc

SEQ ID NO: 11332 - RNA, 20 nt, Homo sapiens
  source 1..20: mol_type = genomic RNA
atccgaaagcgccgcaagcc

SEQ ID NO: 11333 - RNA, 20 nt, Homo sapiens
  source 1..20: mol_type = genomic RNA
tccgaaagcgccgcaagccc

SEQ ID NO: 11334 - RNA, 20 nt, Homo sapiens
  source 1..20: mol_type = genomic RNA
ccgaaagcgccgcaagcccc

SEQ ID NO: 11335 - RNA, 20 nt, Homo sapiens
  source 1..20: mol_type = genomic RNA
cgaaagcgccgcaagccccg

SEQ ID NO: 11336 - RNA, 20 nt, Homo sapiens
  source 1..20: mol_type = genomic RNA
gaaagcgccgcaagccccgc

SEQ ID NO: 11337 - RNA, 20 nt, Homo sapiens
  source 1..20: mol_type = genomic RNA
aaagcgccgcaagccccgcg

SEQ ID NO: 11338 - RNA, 20 nt, Homo sapiens
  source 1..20: mol_type = genomic RNA
aagcgccgcaagccccgcgg

SEQ ID NO: 11339 - RNA, 20 nt, Homo sapiens
  source 1..20: mol_type = genomic RNA
agcgccgcaagccccgcggg

SEQ ID NO: 11340 - RNA, 20 nt, Homo sapiens
  source 1..20: mol_type = genomic RNA
gcgccgcaagccccgcgggc

SEQ ID NO: 11341 - RNA, 20 nt, Homo sapiens
  source 1..20: mol_type = genomic RNA
cgccgcaagccccgcgggcc

SEQ ID NO: 11342 - RNA, 20 nt, Homo sapiens
  source 1..20: mol_type = genomic RNA
gccgcaagccccgcgggccg

SEQ ID NO: 11343 - RNA, 20 nt, Homo sapiens
  source 1..20: mol_type = genomic RNA
ccgcaagccccgcgggccgg

SEQ ID NO: 11344 - RNA, 20 nt, Homo sapiens
  source 1..20: mol_type = genomic RNA
cgcaagccccgcgggccggc

SEQ ID NO: 11345 - RNA, 20 nt, Homo sapiens
  source 1..20: mol_type = genomic RNA
gcaagccccgcgggccggcc

SEQ ID NO: 11346 - RNA, 20 nt, Homo sapiens
  source 1..20: mol_type = genomic RNA
caagccccgcgggccggccg

SEQ ID NO: 11347 - RNA, 20 nt, Homo sapiens
  source 1..20: mol_type = genomic RNA
aagccccgcgggccggccgc

SEQ ID NO: 11348 - RNA, 20 nt, Homo sapiens
  source 1..20: mol_type = genomic RNA
agccccgcgggccggccgca

SEQ ID NO: 11349 - RNA, 20 nt, Homo sapiens
  source 1..20: mol_type = genomic RNA
gccccgcgggccggccgcac

SEQ ID NO: 11350 - RNA, 20 nt, Homo sapiens
  source 1..20: mol_type = genomic RNA
ccccgcgggccggccgcacc

SEQ ID NO: 11351 - RNA, 20 nt, Homo sapiens
  source 1..20: mol_type = genomic RNA
cccgcgggccggccgcaccg

SEQ ID NO: 11352 - RNA, 20 nt, Homo sapiens
  source 1..20: mol_type = genomic RNA
ccgcgggccggccgcaccgc

SEQ ID NO: 11353 - RNA, 20 nt, Homo sapiens
  source 1..20: mol_type = genomic RNA
cgcgggccggccgcaccgca

SEQ ID NO: 11354 - RNA, 20 nt, Homo sapiens
  source 1..20: mol_type = genomic RNA
gcgggccggccgcaccgcac

SEQ ID NO: 11355 - RNA, 20 nt, Homo sapiens
  source 1..20: mol_type = genomic RNA
cgggccggccgcaccgcacg

SEQ ID NO: 11356 - RNA, 20 nt, Homo sapiens
  source 1..20: mol_type = genomic RNA
gggccggccgcaccgcacgt

SEQ ID NO: 11357 - RNA, 20 nt, Homo sapiens
  source 1..20: mol_type = genomic RNA
ggccggccgcaccgcacgtg

SEQ ID NO: 11358 - RNA, 20 nt, Homo sapiens
  source 1..20: mol_type = genomic RNA
gccggccgcaccgcacgtgt

SEQ ID NO: 11359 - RNA, 20 nt, Homo sapiens
  source 1..20: mol_type = genomic RNA
ccggccgcaccgcacgtgtc

SEQ ID NO: 11360 - RNA, 20 nt, Homo sapiens
  source 1..20: mol_type = genomic RNA
cggccgcaccgcacgtgtca

SEQ ID NO: 11361 - RNA, 20 nt, Homo sapiens
  source 1..20: mol_type = genomic RNA
ggccgcaccgcacgtgtcac

SEQ ID NO: 11362 - RNA, 20 nt, Homo sapiens
  source 1..20: mol_type = genomic RNA
gccgcaccgcacgtgtcacc

SEQ ID NO: 11363 - RNA, 20 nt, Homo sapiens
  source 1..20: mol_type = genomic RNA
ccgcaccgcacgtgtcaccg

SEQ ID NO: 11364 - RNA, 20 nt, Homo sapiens
  source 1..20: mol_type = genomic RNA
cgcaccgcacgtgtcaccga

SEQ ID NO: 11365 - RNA, 20 nt, Homo sapiens
  source 1..20: mol_type = genomic RNA
gcaccgcacgtgtcaccgag

SEQ ID NO: 11366 - RNA, 20 nt, Homo sapiens
  source 1..20: mol_type = genomic RNA
caccgcacgtgtcaccgaga

SEQ ID NO: 11367 - RNA, 20 nt, Homo sapiens
  source 1..20: mol_type = genomic RNA
accgcacgtgtcaccgagaa

SEQ ID NO: 11368 - RNA, 20 nt, Homo sapiens
  source 1..20: mol_type = genomic RNA
ccgcacgtgtcaccgagaag

SEQ ID NO: 11369 - RNA, 20 nt, Homo sapiens
  source 1..20: mol_type = genomic RNA
cgcacgtgtcaccgagaagc

SEQ ID NO: 11370 - RNA, 20 nt, Homo sapiens
  source 1..20: mol_type = genomic RNA
gcacgtgtcaccgagaagct

SEQ ID NO: 11371 - RNA, 20 nt, Homo sapiens
  source 1..20: mol_type = genomic RNA
cacgtgtcaccgagaagctg

SEQ ID NO: 11372 - RNA, 20 nt, Homo sapiens
  source 1..20: mol_type = genomic RNA
acgtgtcaccgagaagctga

SEQ ID NO: 11373 - RNA, 20 nt, Homo sapiens
  source 1..20: mol_type = genomic RNA
cgtgtcaccgagaagctgat

SEQ ID NO: 11374 - RNA, 20 nt, Homo sapiens
  source 1..20: mol_type = genomic RNA
gtgtcaccgagaagctgatg

SEQ ID NO: 11375 - RNA, 20 nt, Homo sapiens
  source 1..20: mol_type = genomic RNA
tgtcaccgagaagctgatgt

SEQ ID NO: 11376 - RNA, 20 nt, Homo sapiens
  source 1..20: mol_type = genomic RNA
gtcaccgagaagctgatgta

SEQ ID NO: 11377 - RNA, 20 nt, Homo sapiens
  source 1..20: mol_type = genomic RNA
tcaccgagaagctgatgtag

SEQ ID NO: 11378 - RNA, 20 nt, Homo sapiens
  source 1..20: mol_type = genomic RNA
caccgagaagctgatgtaga

SEQ ID NO: 11379 - RNA, 20 nt, Homo sapiens
  source 1..20: mol_type = genomic RNA
accgagaagctgatgtagag

SEQ ID NO: 11380 - RNA, 20 nt, Homo sapiens
  source 1..20: mol_type = genomic RNA
ccgagaagctgatgtagaga

SEQ ID NO: 11381 - RNA, 20 nt, Homo sapiens
  source 1..20: mol_type = genomic RNA
cgagaagctgatgtagagag

SEQ ID NO: 11382 - RNA, 20 nt, Homo sapiens
  source 1..20: mol_type = genomic RNA
gagaagctgatgtagagaga

SEQ ID NO: 11383 - RNA, 20 nt, Homo sapiens
  source 1..20: mol_type = genomic RNA
agaagctgatgtagagagag

SEQ ID NO: 11384 - RNA, 20 nt, Homo sapiens
  source 1..20: mol_type = genomic RNA
gaagctgatgtagagagaga

SEQ ID NO: 11385 - RNA, 20 nt, Homo sapiens
  source 1..20: mol_type = genomic RNA
aagctgatgtagagagagac

SEQ ID NO: 11386 - RNA, 20 nt, Homo sapiens
  source 1..20: mol_type = genomic RNA
agctgatgtagagagagaca

SEQ ID NO: 11387 - RNA, 20 nt, Homo sapiens
  source 1..20: mol_type = genomic RNA
gctgatgtagagagagacac

SEQ ID NO: 11388 - RNA, 20 nt, Homo sapiens
  source 1..20: mol_type = genomic RNA
ctgatgtagagagagacaca

SEQ ID NO: 11389 - RNA, 20 nt, Homo sapiens
  source 1..20: mol_type = genomic RNA
tgatgtagagagagacacag

SEQ ID NO: 11390 - RNA, 20 nt, Homo sapiens
  source 1..20: mol_type = genomic RNA
gatgtagagagagacacaga

SEQ ID NO: 11391 - RNA, 20 nt, Homo sapiens
  source 1..20: mol_type = genomic RNA
atgtagagagagacacagaa

SEQ ID NO: 11392 - RNA, 20 nt, Homo sapiens
  source 1..20: mol_type = genomic RNA
tgtagagagagacacagaag

SEQ ID NO: 11393 - RNA, 20 nt, Homo sapiens
  source 1..20: mol_type = genomic RNA
gtagagagagacacagaagg

SEQ ID NO: 11394 - RNA, 20 nt, Homo sapiens
  source 1..20: mol_type = genomic RNA
tagagagagacacagaagga

SEQ ID NO: 11395 - RNA, 20 nt, Homo sapiens
  source 1..20: mol_type = genomic RNA
agagagagacacagaaggag

SEQ ID NO: 11396 - RNA, 20 nt, Homo sapiens
  source 1..20: mol_type = genomic RNA
gagagagacacagaaggaga

SEQ ID NO: 11397 - RNA, 20 nt, Homo sapiens
  source 1..20: mol_type = genomic RNA
agagagacacagaaggagac

SEQ ID NO: 11398 - RNA, 20 nt, Homo sapiens
  source 1..20: mol_type = genomic RNA
gagagacacagaaggagaca

SEQ ID NO: 11399 - RNA, 20 nt, Homo sapiens
  source 1..20: mol_type = genomic RNA
agagacacagaaggagacag

SEQ ID NO: 11400 - RNA, 20 nt, Homo sapiens
  source 1..20: mol_type = genomic RNA
gagacacagaaggagacaga

SEQ ID NO: 11401 - RNA, 20 nt, Homo sapiens
  source 1..20: mol_type = genomic RNA
agacacagaaggagacagaa

SEQ ID NO: 11402 - RNA, 20 nt, Homo sapiens
  source 1..20: mol_type = genomic RNA
gacacagaaggagacagaaa

SEQ ID NO: 11403 - RNA, 20 nt, Homo sapiens
  source 1..20: mol_type = genomic RNA
acacagaaggagacagaaag

SEQ ID NO: 11404 - RNA, 20 nt, Homo sapiens
  source 1..20: mol_type = genomic RNA
cacagaaggagacagaaagc

SEQ ID NO: 11405 - RNA, 20 nt, Homo sapiens
  source 1..20: mol_type = genomic RNA
acagaaggagacagaaagca

SEQ ID NO: 11406 - RNA, 20 nt, Homo sapiens
  source 1..20: mol_type = genomic RNA
cagaaggagacagaaagcaa

SEQ ID NO: 11407 - RNA, 20 nt, Homo sapiens
  source 1..20: mol_type = genomic RNA
agaaggagacagaaagcaag

SEQ ID NO: 11408 - RNA, 20 nt, Homo sapiens
  source 1..20: mol_type = genomic RNA
gaaggagacagaaagcaaga

SEQ ID NO: 11409 - RNA, 20 nt, Homo sapiens
  source 1..20: mol_type = genomic RNA
aaggagacagaaagcaagag

SEQ ID NO: 11410 - RNA, 20 nt, Homo sapiens
  source 1..20: mol_type = genomic RNA
aggagacagaaagcaagaga

SEQ ID NO: 11411 - RNA, 20 nt, Homo sapiens
  source 1..20: mol_type = genomic RNA
ggagacagaaagcaagagac

SEQ ID NO: 11412 - RNA, 20 nt, Homo sapiens
  source 1..20: mol_type = genomic RNA
gagacagaaagcaagagacc

SEQ ID NO: 11413 - RNA, 20 nt, Homo sapiens
  source 1..20: mol_type = genomic RNA
agacagaaagcaagagacca

SEQ ID NO: 11414 - RNA, 20 nt, Homo sapiens
  source 1..20: mol_type = genomic RNA
gacagaaagcaagagaccag

SEQ ID NO: 11415 - RNA, 20 nt, Homo sapiens
  source 1..20: mol_type = genomic RNA
acagaaagcaagagaccaga

SEQ ID NO: 11416 - RNA, 20 nt, Homo sapiens
  source 1..20: mol_type = genomic RNA
cagaaagcaagagaccagag

SEQ ID NO: 11417 - RNA, 20 nt, Homo sapiens
  source 1..20: mol_type = genomic RNA
agaaagcaagagaccagagt

SEQ ID NO: 11418 - RNA, 20 nt, Homo sapiens
  source 1..20: mol_type = genomic RNA
gaaagcaagagaccagagtc

SEQ ID NO: 11419 - RNA, 20 nt, Homo sapiens
  source 1..20: mol_type = genomic RNA
aaagcaagagaccagagtcc

SEQ ID NO: 11420 - RNA, 20 nt, Homo sapiens
  source 1..20: mol_type = genomic RNA
aagcaagagaccagagtccc

SEQ ID NO: 11421 - RNA, 20 nt, Homo sapiens
  source 1..20: mol_type = genomic RNA
agcaagagaccagagtcccg

SEQ ID NO: 11422 - RNA, 20 nt, Homo sapiens
  source 1..20: mol_type = genomic RNA
gcaagagaccagagtcccgg

SEQ ID NO: 11423 - RNA, 20 nt, Homo sapiens
  source 1..20: mol_type = genomic RNA
caagagaccagagtcccggg

SEQ ID NO: 11424 - RNA, 20 nt, Homo sapiens
  source 1..20: mol_type = genomic RNA
aagagaccagagtcccggga

SEQ ID NO: 11425 - RNA, 20 nt, Homo sapiens
  source 1..20: mol_type = genomic RNA
agagaccagagtcccgggaa

SEQ ID NO: 11426 - RNA, 20 nt, Homo sapiens
  source 1..20: mol_type = genomic RNA
gagaccagagtcccgggaaa

SEQ ID NO: 11427 - RNA, 20 nt, Homo sapiens
  source 1..20: mol_type = genomic RNA
agaccagagtcccgggaaag

SEQ ID NO: 11428 - RNA, 20 nt, Homo sapiens
  source 1..20: mol_type = genomic RNA
gaccagagtcccgggaaagt

SEQ ID NO: 11429 - RNA, 20 nt, Homo sapiens
  source 1..20: mol_type = genomic RNA
accagagtcccgggaaagtc

SEQ ID NO: 11430 - RNA, 20 nt, Homo sapiens
  source 1..20: mol_type = genomic RNA
ccagagtcccgggaaagtcc

SEQ ID NO: 11431 - RNA, 20 nt, Homo sapiens
  source 1..20: mol_type = genomic RNA
cagagtcccgggaaagtcct

SEQ ID NO: 11432 - RNA, 20 nt, Homo sapiens
  source 1..20: mol_type = genomic RNA
agagtcccgggaaagtcctg

SEQ ID NO: 11433 - RNA, 20 nt, Homo sapiens
  source 1..20: mol_type = genomic RNA
gagtcccgggaaagtcctgc

SEQ ID NO: 11434 - RNA, 20 nt, Homo sapiens
  source 1..20: mol_type = genomic RNA
agtcccgggaaagtcctgcc

SEQ ID NO: 11435 - RNA, 20 nt, Homo sapiens
  source 1..20: mol_type = genomic RNA
gtcccgggaaagtcctgccg

SEQ ID NO: 11436 - RNA, 20 nt, Homo sapiens
  source 1..20: mol_type = genomic RNA
tcccgggaaagtcctgccgc

SEQ ID NO: 11437 - RNA, 20 nt, Homo sapiens
  source 1..20: mol_type = genomic RNA
cccgggaaagtcctgccgcg

SEQ ID NO: 11438 - RNA, 20 nt, Homo sapiens
  source 1..20: mol_type = genomic RNA
ccgggaaagtcctgccgcgc

SEQ ID NO: 11439 - RNA, 20 nt, Homo sapiens
  source 1..20: mol_type = genomic RNA
cgggaaagtcctgccgcgcc

SEQ ID NO: 11440 - RNA, 20 nt, Homo sapiens
  source 1..20: mol_type = genomic RNA
gggaaagtcctgccgcgcct

SEQ ID NO: 11441 - RNA, 20 nt, Homo sapiens
  source 1..20: mol_type = genomic RNA
ggaaagtcctgccgcgcctc

SEQ ID NO: 11442 - RNA, 20 nt, Homo sapiens
  source 1..20: mol_type = genomic RNA
gaaagtcctgccgcgcctcg

SEQ ID NO: 11443 - RNA, 20 nt, Homo sapiens
  source 1..20: mol_type = genomic RNA
aaagtcctgccgcgcctcgg

SEQ ID NO: 11444 - RNA, 20 nt, Homo sapiens
  source 1..20: mol_type = genomic RNA
aagtcctgccgcgcctcggg

SEQ ID NO: 11445 - RNA, 20 nt, Homo sapiens
  source 1..20: mol_type = genomic RNA
agtcctgccgcgcctcggga

SEQ ID NO: 11446 - RNA, 20 nt, Homo sapiens
  source 1..20: mol_type = genomic RNA
gtcctgccgcgcctcgggac

SEQ ID NO: 11447 - RNA, 20 nt, Homo sapiens
  source 1..20: mol_type = genomic RNA
tcctgccgcgcctcgggaca

SEQ ID NO: 11448 - RNA, 20 nt, Homo sapiens
  source 1..20: mol_type = genomic RNA
cctgccgcgcctcgggacaa

SEQ ID NO: 11449 - RNA, 20 nt, Homo sapiens
  source 1..20: mol_type = genomic RNA
ctgccgcgcctcgggacaat

SEQ ID NO: 11450 - RNA, 20 nt, Homo sapiens
  source 1..20: mol_type = genomic RNA
tgccgcgcctcgggacaatt

SEQ ID NO: 11451 - RNA, 20 nt, Homo sapiens
  source 1..20: mol_type = genomic RNA
gccgcgcctcgggacaatta

SEQ ID NO: 11452 - RNA, 20 nt, Homo sapiens
  source 1..20: mol_type = genomic RNA
ccgcgcctcgggacaattat

SEQ ID NO: 11453 - RNA, 20 nt, Homo sapiens
  source 1..20: mol_type = genomic RNA
cgcgcctcgggacaattata

SEQ ID NO: 11454 - RNA, 20 nt, Homo sapiens
  source 1..20: mol_type = genomic RNA
gcgcctcgggacaattataa

SEQ ID NO: 11455 - RNA, 20 nt, Homo sapiens
  source 1..20: mol_type = genomic RNA
cgcctcgggacaattataaa

SEQ ID NO: 11456 - RNA, 20 nt, Homo sapiens
  source 1..20: mol_type = genomic RNA
gcctcgggacaattataaaa

SEQ ID NO: 11457 - RNA, 20 nt, Homo sapiens
  source 1..20: mol_type = genomic RNA
cctcgggacaattataaaaa

SEQ ID NO: 11458 - RNA, 20 nt, Homo sapiens
  source 1..20: mol_type = genomic RNA
ctcgggacaattataaaaat

SEQ ID NO: 11459 - RNA, 20 nt, Homo sapiens
  source 1..20: mol_type = genomic RNA
tcgggacaattataaaaatg

SEQ ID NO: 11460 - RNA, 20 nt, Homo sapiens
  source 1..20: mol_type = genomic RNA
cgggacaattataaaaatgt

SEQ ID NO: 11461 - RNA, 20 nt, Homo sapiens
  source 1..20: mol_type = genomic RNA
gggacaattataaaaatgtg

SEQ ID NO: 11462 - RNA, 20 nt, Homo sapiens
  source 1..20: mol_type = genomic RNA
ggacaattataaaaatgtgg

SEQ ID NO: 11463 - RNA, 20 nt, Homo sapiens
  source 1..20: mol_type = genomic RNA
gacaattataaaaatgtggc

SEQ ID NO: 11464 - RNA, 20 nt, Homo sapiens
  source 1..20: mol_type = genomic RNA
acaattataaaaatgtggcc

SEQ ID NO: 11465 - RNA, 20 nt, Homo sapiens
  source 1..20: mol_type = genomic RNA
caattataaaaatgtggccc

SEQ ID NO: 11466 - RNA, 20 nt, Homo sapiens
  source 1..20: mol_type = genomic RNA
aattataaaaatgtggcccc

SEQ ID NO: 11467 - RNA, 20 nt, Homo sapiens
  source 1..20: mol_type = genomic RNA
attataaaaatgtggccccc

SEQ ID NO: 11468 - RNA, 20 nt, Homo sapiens
  source 1..20: mol_type = genomic RNA
ttataaaaatgtggccccct

SEQ ID NO: 11469 - RNA, 20 nt, Homo sapiens
  source 1..20: mol_type = genomic RNA
tataaaaatgtggccccctg

SEQ ID NO: 11470 - RNA, 20 nt, Homo sapiens
  source 1..20: mol_type = genomic RNA
ataaaaatgtggccccctgg

SEQ ID NO: 11471 - RNA, 20 nt, Homo sapiens
  source 1..20: mol_type = genomic RNA
taaaaatgtggccccctggg

SEQ ID NO: 11472 - RNA, 20 nt, Homo sapiens
  source 1..20: mol_type = genomic RNA
aaaaatgtggccccctgggt

SEQ ID NO: 11473 - RNA, 20 nt, Homo sapiens
  source 1..20: mol_type = genomic RNA
aaaatgtggccccctgggtc

SEQ ID NO: 11474 - RNA, 20 nt, Homo sapiens
  source 1..20: mol_type = genomic RNA
aaatgtggccccctgggtca

SEQ ID NO: 11475 - RNA, 20 nt, Homo sapiens
  source 1..20: mol_type = genomic RNA
aatgtggccccctgggtcag

SEQ ID NO: 11476 - RNA, 20 nt, Homo sapiens
  source 1..20: mol_type = genomic RNA
atgtggccccctgggtcagc

SEQ ID NO: 11477 - RNA, 20 nt, Homo sapiens
  source 1..20: mol_type = genomic RNA
tgtggccccctgggtcagcc

SEQ ID NO: 11478 - RNA, 20 nt, Homo sapiens
  source 1..20: mol_type = genomic RNA
gtggccccctgggtcagcct

SEQ ID NO: 11479 - RNA, 20 nt, Homo sapiens
  source 1..20: mol_type = genomic RNA
tggccccctgggtcagcctc

SEQ ID NO: 11480 - RNA, 20 nt, Homo sapiens
  source 1..20: mol_type = genomic RNA
ggccccctgggtcagcctcc

SEQ ID NO: 11481 - RNA, 20 nt, Homo sapiens
  source 1..20: mol_type = genomic RNA
gccccctgggtcagcctccc

SEQ ID NO: 11482 - RNA, 20 nt, Homo sapiens
  source 1..20: mol_type = genomic RNA
ccccctgggtcagcctccca

SEQ ID NO: 11483 - RNA, 20 nt, Homo sapiens
  source 1..20: mol_type = genomic RNA
cccctgggtcagcctcccag

SEQ ID NO: 11484 - RNA, 20 nt, Homo sapiens
  source 1..20: mol_type = genomic RNA
ccctgggtcagcctcccagc

SEQ ID NO: 11485 - RNA, 20 nt, Homo sapiens
  source 1..20: mol_type = genomic RNA
cctgggtcagcctcccagcc

SEQ ID NO: 11486 - RNA, 20 nt, Homo sapiens
  source 1..20: mol_type = genomic RNA
ctgggtcagcctcccagcca

SEQ ID NO: 11487 - RNA, 20 nt, Homo sapiens
  source 1..20: mol_type = genomic RNA
tgggtcagcctcccagccac

SEQ ID NO: 11488 - RNA, 20 nt, Homo sapiens
  source 1..20: mol_type = genomic RNA
gggtcagcctcccagccacc

SEQ ID NO: 11489 - RNA, 20 nt, Homo sapiens
  source 1..20: mol_type = genomic RNA
ggtcagcctcccagccaccg

SEQ ID NO: 11490 - RNA, 20 nt, Homo sapiens
  source 1..20: mol_type = genomic RNA
gtcagcctcccagccaccgc

SEQ ID NO: 11491 - RNA, 20 nt, Homo sapiens
  source 1..20: mol_type = genomic RNA
tcagcctcccagccaccgcc

SEQ ID NO: 11492 - RNA, 20 nt, Homo sapiens
  source 1..20: mol_type = genomic RNA
cagcctcccagccaccgccc

SEQ ID NO: 11493 - RNA, 20 nt, Homo sapiens
  source 1..20: mol_type = genomic RNA
agcctcccagccaccgccct

SEQ ID NO: 11494 - RNA, 20 nt, Homo sapiens
  source 1..20: mol_type = genomic RNA
gcctcccagccaccgccctc

SEQ ID NO: 11495 - RNA, 20 nt, Homo sapiens
  source 1..20: mol_type = genomic RNA
cctcccagccaccgccctca

SEQ ID NO: 11496 - RNA, 20 nt, Homo sapiens
  source 1..20: mol_type = genomic RNA
ctcccagccaccgccctcac

SEQ ID NO: 11497 - RNA, 20 nt, Homo sapiens
  source 1..20: mol_type = genomic RNA
tcccagccaccgccctcacc

SEQ ID NO: 11498 - RNA, 20 nt, Homo sapiens
  source 1..20: mol_type = genomic RNA
cccagccaccgccctcacct

SEQ ID NO: 11499 - RNA, 20 nt, Homo sapiens
  source 1..20: mol_type = genomic RNA
ccagccaccgccctcacctg

SEQ ID NO: 11500 - RNA, 20 nt, Homo sapiens
  source 1..20: mol_type = genomic RNA
cagccaccgccctcacctgc

SEQ ID NO: 11501 - RNA, 20 nt, Homo sapiens
  source 1..20: mol_type = genomic RNA
agccaccgccctcacctgcc

SEQ ID NO: 11502 - RNA, 20 nt, Homo sapiens
  source 1..20: mol_type = genomic RNA
gccaccgccctcacctgccg

SEQ ID NO: 11503 - RNA, 20 nt, Homo sapiens
  source 1..20: mol_type = genomic RNA
ccaccgccctcacctgccgc

SEQ ID NO: 11504 - RNA, 20 nt, Homo sapiens
  source 1..20: mol_type = genomic RNA
caccgccctcacctgccgcg

SEQ ID NO: 11505 - RNA, 20 nt, Homo sapiens
  source 1..20: mol_type = genomic RNA
accgccctcacctgccgcgg

SEQ ID NO: 11506 - RNA, 20 nt, Homo sapiens
  source 1..20: mol_type = genomic RNA
ccgccctcacctgccgcggc

SEQ ID NO: 11507 - RNA, 20 nt, Homo sapiens
  source 1..20: mol_type = genomic RNA
cgccctcacctgccgcggcc

SEQ ID NO: 11508 - RNA, 20 nt, Homo sapiens
  source 1..20: mol_type = genomic RNA
gccctcacctgccgcggcca

SEQ ID NO: 11509 - RNA, 20 nt, Homo sapiens
  source 1..20: mol_type = genomic RNA
ccctcacctgccgcggccac

SEQ ID NO: 11510 - RNA, 20 nt, Homo sapiens
  source 1..20: mol_type = genomic RNA
cctcacctgccgcggccaca

SEQ ID NO: 11511 - RNA, 20 nt, Homo sapiens
  source 1..20: mol_type = genomic RNA
ctcacctgccgcggccacag

SEQ ID NO: 11512 - RNA, 20 nt, Homo sapiens
  source 1..20: mol_type = genomic RNA
tcacctgccgcggccacagg

SEQ ID NO: 11513 - RNA, 20 nt, Homo sapiens
  source 1..20: mol_type = genomic RNA
cacctgccgcggccacaggt

SEQ ID NO: 11514 - RNA, 20 nt, Homo sapiens
  source 1..20: mol_type = genomic RNA
acctgccgcggccacaggtc

SEQ ID NO: 11515 - RNA, 20 nt, Homo sapiens
  source 1..20: mol_type = genomic RNA
cctgccgcggccacaggtct

SEQ ID NO: 11516 - RNA, 20 nt, Homo sapiens
  source 1..20: mol_type = genomic RNA
ctgccgcggccacaggtctg

SEQ ID NO: 11517 - RNA, 20 nt, Homo sapiens
  source 1..20: mol_type = genomic RNA
tgccgcggccacaggtctgc

SEQ ID NO: 11518 - RNA, 20 nt, Homo sapiens
  source 1..20: mol_type = genomic RNA
gccgcggccacaggtctgca

SEQ ID NO: 11519 - RNA, 20 nt, Homo sapiens
  source 1..20: mol_type = genomic RNA
ccgcggccacaggtctgcat

SEQ ID NO: 11520 - RNA, 20 nt, Homo sapiens
  source 1..20: mol_type = genomic RNA
cgcggccacaggtctgcatc

SEQ ID NO: 11521 - RNA, 20 nt, Homo sapiens
  source 1..20: mol_type = genomic RNA
gcggccacaggtctgcatcc

SEQ ID NO: 11522 - RNA, 20 nt, Homo sapiens
  source 1..20: mol_type = genomic RNA
cggccacaggtctgcatcca

SEQ ID NO: 11523 - RNA, 20 nt, Homo sapiens
  source 1..20: mol_type = genomic RNA
ggccacaggtctgcatccag

SEQ ID NO: 11524 - RNA, 20 nt, Homo sapiens
  source 1..20: mol_type = genomic RNA
gccacaggtctgcatccagc

SEQ ID NO: 11525 - RNA, 20 nt, Homo sapiens
  source 1..20: mol_type = genomic RNA
ccacaggtctgcatccagcg

SEQ ID NO: 11526 - RNA, 20 nt, Homo sapiens
  source 1..20: mol_type = genomic RNA
cacaggtctgcatccagcgg

SEQ ID NO: 11527 - RNA, 20 nt, Homo sapiens
  source 1..20: mol_type = genomic RNA
acaggtctgcatccagcggc

SEQ ID NO: 11528 - RNA, 20 nt, Homo sapiens
  source 1..20: mol_type = genomic RNA
caggtctgcatccagcggct

SEQ ID NO: 11529 - RNA, 20 nt, Homo sapiens
  source 1..20: mol_type = genomic RNA
aggtctgcatccagcggctc

SEQ ID NO: 11530 - RNA, 20 nt, Homo sapiens
  source 1..20: mol_type = genomic RNA
ggtctgcatccagcggctcg

SEQ ID NO: 11531 - RNA, 20 nt, Homo sapiens
  source 1..20: mol_type = genomic RNA
gtctgcatccagcggctcgc

SEQ ID NO: 11532 - RNA, 20 nt, Homo sapiens
  source 1..20: mol_type = genomic RNA
tctgcatccagcggctcgcc

SEQ ID NO: 11533 - RNA, 20 nt, Homo sapiens
  source 1..20: mol_type = genomic RNA
ctgcatccagcggctcgccc

SEQ ID NO: 11534 - RNA, 20 nt, Homo sapiens
  source 1..20: mol_type = genomic RNA
tgcatccagcggctcgccct

SEQ ID NO: 11535 - RNA, 20 nt, Homo sapiens
  source 1..20: mol_type = genomic RNA
gcatccagcggctcgccctg

SEQ ID NO: 11536 - RNA, 20 nt, Homo sapiens
  source 1..20: mol_type = genomic RNA
catccagcggctcgccctgt

SEQ ID NO: 11537 - RNA, 20 nt, Homo sapiens
  source 1..20: mol_type = genomic RNA
atccagcggctcgccctgtg

SEQ ID NO: 11538 - RNA, 20 nt, Homo sapiens
  source 1..20: mol_type = genomic RNA
tccagcggctcgccctgtgt

SEQ ID NO: 11539 - RNA, 20 nt, Homo sapiens
  source 1..20: mol_type = genomic RNA
ccagcggctcgccctgtgtc

SEQ ID NO: 11540 - RNA, 20 nt, Homo sapiens
  source 1..20: mol_type = genomic RNA
cagcggctcgccctgtgtcc

SEQ ID NO: 11541 - RNA, 20 nt, Homo sapiens
  source 1..20: mol_type = genomic RNA
agcggctcgccctgtgtccc

SEQ ID NO: 11542 - RNA, 20 nt, Homo sapiens
  source 1..20: mol_type = genomic RNA
gcggctcgccctgtgtccct

SEQ ID NO: 11543 - RNA, 20 nt, Homo sapiens
  source 1..20: mol_type = genomic RNA
cggctcgccctgtgtccctg

SEQ ID NO: 11544 - RNA, 20 nt, Homo sapiens
  source 1..20: mol_type = genomic RNA
ggctcgccctgtgtccctgc

SEQ ID NO: 11545 - RNA, 20 nt, Homo sapiens
  source 1..20: mol_type = genomic RNA
gctcgccctgtgtccctgca

SEQ ID NO: 11546 - RNA, 20 nt, Homo sapiens
  source 1..20: mol_type = genomic RNA
ctcgccctgtgtccctgcag

SEQ ID NO: 11547 - RNA, 20 nt, Homo sapiens
  source 1..20: mol_type = genomic RNA
tcgccctgtgtccctgcagt

SEQ ID NO: 11548 - RNA, 20 nt, Homo sapiens
  source 1..20: mol_type = genomic RNA
cgccctgtgtccctgcagtg

SEQ ID NO: 11549 - RNA, 20 nt, Homo sapiens
  source 1..20: mol_type = genomic RNA
gccctgtgtccctgcagtgc

SEQ ID NO: 11550 - RNA, 20 nt, Homo sapiens
  source 1..20: mol_type = genomic RNA
ccctgtgtccctgcagtgcc

SEQ ID NO: 11551 - RNA, 20 nt, Homo sapiens
  source 1..20: mol_type = genomic RNA
cctgtgtccctgcagtgccg

SEQ ID NO: 11552 - RNA, 20 nt, Homo sapiens
  source 1..20: mol_type = genomic RNA
ctgtgtccctgcagtgccgg

SEQ ID NO: 11553 - RNA, 20 nt, Homo sapiens
  source 1..20: mol_type = genomic RNA
tgtgtccctgcagtgccggc

SEQ ID NO: 11554 - RNA, 20 nt, Homo sapiens
  source 1..20: mol_type = genomic RNA
gtgtccctgcagtgccggct

SEQ ID NO: 11555 - RNA, 20 nt, Homo sapiens
  source 1..20: mol_type = genomic RNA
tgtccctgcagtgccggctc

SEQ ID NO: 11556 - RNA, 20 nt, Homo sapiens
  source 1..20: mol_type = genomic RNA
gtccctgcagtgccggctca

SEQ ID NO: 11557 - RNA, 20 nt, Homo sapiens
  source 1..20: mol_type = genomic RNA
tccctgcagtgccggctcag

SEQ ID NO: 11558 - RNA, 20 nt, Homo sapiens
  source 1..20: mol_type = genomic RNA
ccctgcagtgccggctcagc

SEQ ID NO: 11559 - RNA, 20 nt, Homo sapiens
  source 1..20: mol_type = genomic RNA
cctgcagtgccggctcagca

SEQ ID NO: 11560 - RNA, 20 nt, Homo sapiens
  source 1..20: mol_type = genomic RNA
ctgcagtgccggctcagcat

SEQ ID NO: 11561 - RNA, 20 nt, Homo sapiens
  source 1..20: mol_type = genomic RNA
tgcagtgccggctcagcatg

SEQ ID NO: 11562 - RNA, 20 nt, Homo sapiens
  source 1..20: mol_type = genomic RNA
gcagtgccggctcagcatgt

SEQ ID NO: 11563 - RNA, 20 nt, Homo sapiens
  source 1..20: mol_type = genomic RNA
cagtgccggctcagcatgtg

SEQ ID NO: 11564 - RNA, 20 nt, Homo sapiens
  source 1..20: mol_type = genomic RNA
agtgccggctcagcatgtgt

SEQ ID NO: 11565 - RNA, 20 nt, Homo sapiens
  source 1..20: mol_type = genomic RNA
gtgccggctcagcatgtgtc

SEQ ID NO: 11566 - RNA, 20 nt, Homo sapiens
  source 1..20: mol_type = genomic RNA
tgccggctcagcatgtgtcc

SEQ ID NO: 11567 - RNA, 20 nt, Homo sapiens
  source 1..20: mol_type = genomic RNA
gccggctcagcatgtgtcca

SEQ ID NO: 11568 - RNA, 20 nt, Homo sapiens
  source 1..20: mol_type = genomic RNA
ccggctcagcatgtgtccag

SEQ ID NO: 11569 - RNA, 20 nt, Homo sapiens
  source 1..20: mol_type = genomic RNA
cggctcagcatgtgtccagc

SEQ ID NO: 11570 - RNA, 20 nt, Homo sapiens
  source 1..20: mol_type = genomic RNA
ggctcagcatgtgtccagcg

SEQ ID NO: 11571 - RNA, 20 nt, Homo sapiens
  source 1..20: mol_type = genomic RNA
gctcagcatgtgtccagcgc

SEQ ID NO: 11572 - RNA, 20 nt, Homo sapiens
  source 1..20: mol_type = genomic RNA
ctcagcatgtgtccagcgcg

SEQ ID NO: 11573 - RNA, 20 nt, Homo sapiens
  source 1..20: mol_type = genomic RNA
tcagcatgtgtccagcgcgc

SEQ ID NO: 11574 - RNA, 20 nt, Homo sapiens
  source 1..20: mol_type = genomic RNA
cagcatgtgtccagcgcgca

SEQ ID NO: 11575 - RNA, 20 nt, Homo sapiens
  source 1..20: mol_type = genomic RNA
agcatgtgtccagcgcgcag

SEQ ID NO: 11576 - RNA, 20 nt, Homo sapiens
  source 1..20: mol_type = genomic RNA
gcatgtgtccagcgcgcagc

SEQ ID NO: 11577 - RNA, 20 nt, Homo sapiens
  source 1..20: mol_type = genomic RNA
catgtgtccagcgcgcagcc

SEQ ID NO: 11578 - RNA, 20 nt, Homo sapiens
  source 1..20: mol_type = genomic RNA
atgtgtccagcgcgcagcct

SEQ ID NO: 11579 - RNA, 20 nt, Homo sapiens
  source 1..20: mol_type = genomic RNA
tgtgtccagcgcgcagcctc

SEQ ID NO: 11580 - RNA, 20 nt, Homo sapiens
  source 1..20: mol_type = genomic RNA
gtgtccagcgcgcagcctcc

SEQ ID NO: 11581 - RNA, 20 nt, Homo sapiens
  source 1..20: mol_type = genomic RNA
tgtccagcgcgcagcctcct

SEQ ID NO: 11582 - RNA, 20 nt, Homo sapiens
  source 1..20: mol_type = genomic RNA
gtccagcgcgcagcctcctc

SEQ ID NO: 11583 - RNA, 20 nt, Homo sapiens
  source 1..20: mol_type = genomic RNA
tccagcgcgcagcctcctcc

SEQ ID NO: 11584 - RNA, 20 nt, Homo sapiens
  source 1..20: mol_type = genomic RNA
ccagcgcgcagcctcctcct

SEQ ID NO: 11585 - RNA, 20 nt, Homo sapiens
  source 1..20: mol_type = genomic RNA
cagcgcgcagcctcctcctt

SEQ ID NO: 11586 - RNA, 20 nt, Homo sapiens
  source 1..20: mol_type = genomic RNA
agcgcgcagcctcctccttg

SEQ ID NO: 11587 - RNA, 20 nt, Homo sapiens
  source 1..20: mol_type = genomic RNA
gcgcgcagcctcctccttgt

SEQ ID NO: 11588 - RNA, 20 nt, Homo sapiens
  source 1..20: mol_type = genomic RNA
cgcgcagcctcctccttgtg

SEQ ID NO: 11589 - RNA, 20 nt, Homo sapiens
  source 1..20: mol_type = genomic RNA
gcgcagcctcctccttgtgg

SEQ ID NO: 11590 - RNA, 20 nt, Homo sapiens
  source 1..20: mol_type = genomic RNA
cgcagcctcctccttgtggc

SEQ ID NO: 11591 - RNA, 20 nt, Homo sapiens
  source 1..20: mol_type = genomic RNA
gcagcctcctccttgtggct

SEQ ID NO: 11592 - RNA, 20 nt, Homo sapiens
  source 1..20: mol_type = genomic RNA
cagcctcctccttgtggcta

SEQ ID NO: 11593 - RNA, 20 nt, Homo sapiens
  source 1..20: mol_type = genomic RNA
agcctcctccttgtggctac

SEQ ID NO: 11594 - RNA, 20 nt, Homo sapiens
  source 1..20: mol_type = genomic RNA
gcctcctccttgtggctacc

SEQ ID NO: 11595 - RNA, 20 nt, Homo sapiens
  source 1..20: mol_type = genomic RNA
cctcctccttgtggctaccc

SEQ ID NO: 11596 - RNA, 20 nt, Homo sapiens
  source 1..20: mol_type = genomic RNA
ctcctccttgtggctaccct

SEQ ID NO: 11597 - RNA, 20 nt, Homo sapiens
  source 1..20: mol_type = genomic RNA
tcctccttgtggctaccctg

SEQ ID NO: 11598 - RNA, 20 nt, Homo sapiens
  source 1..20: mol_type = genomic RNA
cctccttgtggctaccctgg

SEQ ID NO: 11599 - RNA, 20 nt, Homo sapiens
  source 1..20: mol_type = genomic RNA
ctccttgtggctaccctggt

SEQ ID NO: 11600 - RNA, 20 nt, Homo sapiens
  source 1..20: mol_type = genomic RNA
tccttgtggctaccctggtc

SEQ ID NO: 11601 - RNA, 20 nt, Homo sapiens
  source 1..20: mol_type = genomic RNA
ccttgtggctaccctggtcc

SEQ ID NO: 11602 - RNA, 20 nt, Homo sapiens
  source 1..20: mol_type = genomic RNA
cttgtggctaccctggtcct

SEQ ID NO: 11603 - RNA, 20 nt, Homo sapiens
  source 1..20: mol_type = genomic RNA
ttgtggctaccctggtcctc

SEQ ID NO: 11604 - RNA, 20 nt, Homo sapiens
  source 1..20: mol_type = genomic RNA
tgtggctaccctggtcctcc

SEQ ID NO: 11605 - RNA, 20 nt, Homo sapiens
  source 1..20: mol_type = genomic RNA
gtggctaccctggtcctcct

SEQ ID NO: 11606 - RNA, 20 nt, Homo sapiens
  source 1..20: mol_type = genomic RNA
tggctaccctggtcctcctg

SEQ ID NO: 11607 - RNA, 20 nt, Homo sapiens
  source 1..20: mol_type = genomic RNA
ggctaccctggtcctcctgg

SEQ ID NO: 11608 - RNA, 20 nt, Homo sapiens
  source 1..20: mol_type = genomic RNA
gctaccctggtcctcctgga

SEQ ID NO: 11609 - RNA, 20 nt, Homo sapiens
  source 1..20: mol_type = genomic RNA
ctaccctggtcctcctggac

SEQ ID NO: 11610 - RNA, 20 nt, Homo sapiens
  source 1..20: mol_type = genomic RNA
taccctggtcctcctggacc

SEQ ID NO: 11611 - RNA, 20 nt, Homo sapiens
  source 1..20: mol_type = genomic RNA
accctggtcctcctggacca

SEQ ID NO: 11612 - RNA, 20 nt, Homo sapiens
  source 1..20: mol_type = genomic RNA
ccctggtcctcctggaccac

SEQ ID NO: 11613 - RNA, 20 nt, Homo sapiens
  source 1..20: mol_type = genomic RNA
cctggtcctcctggaccacc

SEQ ID NO: 11614 - RNA, 20 nt, Homo sapiens
  source 1..20: mol_type = genomic RNA
ctggtcctcctggaccacct

SEQ ID NO: 11615 - RNA, 20 nt, Homo sapiens
  source 1..20: mol_type = genomic RNA
tggtcctcctggaccacctc

SEQ ID NO: 11616 - RNA, 20 nt, Homo sapiens
  source 1..20: mol_type = genomic RNA
ggtcctcctggaccacctca

SEQ ID NO: 11617 - RNA, 20 nt, Homo sapiens
  source 1..20: mol_type = genomic RNA
gtcctcctggaccacctcag

SEQ ID NO: 11618 - RNA, 20 nt, Homo sapiens
  source 1..20: mol_type = genomic RNA
tcctcctggaccacctcagt

SEQ ID NO: 11619 - RNA, 20 nt, Homo sapiens
  source 1..20: mol_type = genomic RNA
cctcctggaccacctcagtt

SEQ ID NO: 11620 - RNA, 20 nt, Homo sapiens
  source 1..20: mol_type = genomic RNA
ctcctggaccacctcagttt

SEQ ID NO: 11621 - RNA, 20 nt, Homo sapiens
  source 1..20: mol_type = genomic RNA
tcctggaccacctcagtttg

SEQ ID NO: 11622 - RNA, 20 nt, Homo sapiens
  source 1..20: mol_type = genomic RNA
cctggaccacctcagtttgg

SEQ ID NO: 11623 - RNA, 20 nt, Homo sapiens
  source 1..20: mol_type = genomic RNA
ctggaccacctcagtttggc

SEQ ID NO: 11624 - RNA, 20 nt, Homo sapiens
  source 1..20: mol_type = genomic RNA
tggaccacctcagtttggcc

SEQ ID NO: 11625 - RNA, 20 nt, Homo sapiens
  source 1..20: mol_type = genomic RNA
ggaccacctcagtttggcca

SEQ ID NO: 11626 - RNA, 20 nt, Homo sapiens
  source 1..20: mol_type = genomic RNA
gaccacctcagtttggccag

SEQ ID NO: 11627 - RNA, 20 nt, Homo sapiens
  source 1..20: mol_type = genomic RNA
accacctcagtttggccaga

SEQ ID NO: 11628 - RNA, 20 nt, Homo sapiens
  source 1..20: mol_type = genomic RNA
ccacctcagtttggccagaa

SEQ ID NO: 11629 - RNA, 20 nt, Homo sapiens
  source 1..20: mol_type = genomic RNA
cacctcagtttggccagaaa

SEQ ID NO: 11630 - RNA, 20 nt, Homo sapiens
  source 1..20: mol_type = genomic RNA
acctcagtttggccagaaac

SEQ ID NO: 11631 - RNA, 20 nt, Homo sapiens
  source 1..20: mol_type = genomic RNA
cctcagtttggccagaaacc

SEQ ID NO: 11632 - RNA, 20 nt, Homo sapiens
  source 1..20: mol_type = genomic RNA
ctcagtttggccagaaacct

SEQ ID NO: 11633 - RNA, 20 nt, Homo sapiens
  source 1..20: mol_type = genomic RNA
tcagtttggccagaaacctc

SEQ ID NO: 11634 - RNA, 20 nt, Homo sapiens
  source 1..20: mol_type = genomic RNA
cagtttggccagaaacctcc

SEQ ID NO: 11635 - RNA, 20 nt, Homo sapiens
  source 1..20: mol_type = genomic RNA
agtttggccagaaacctccc

SEQ ID NO: 11636 - RNA, 20 nt, Homo sapiens
  source 1..20: mol_type = genomic RNA
gtttggccagaaacctcccc

SEQ ID NO: 11637 - RNA, 20 nt, Homo sapiens
  source 1..20: mol_type = genomic RNA
tttggccagaaacctccccg

SEQ ID NO: 11638 - RNA, 20 nt, Homo sapiens
  source 1..20: mol_type = genomic RNA
ttggccagaaacctccccgt

SEQ ID NO: 11639 - RNA, 20 nt, Homo sapiens
  source 1..20: mol_type = genomic RNA
tggccagaaacctccccgtg

SEQ ID NO: 11640 - RNA, 20 nt, Homo sapiens
  source 1..20: mol_type = genomic RNA
ggccagaaacctccccgtgg

SEQ ID NO: 11641 - RNA, 20 nt, Homo sapiens
  source 1..20: mol_type = genomic RNA
gccagaaacctccccgtggc

SEQ ID NO: 11642 - RNA, 20 nt, Homo sapiens
  source 1..20: mol_type = genomic RNA
ccagaaacctccccgtggcc

SEQ ID NO: 11643 - RNA, 20 nt, Homo sapiens
  source 1..20: mol_type = genomic RNA
cagaaacctccccgtggcca

SEQ ID NO: 11644 - RNA, 20 nt, Homo sapiens
  source 1..20: mol_type = genomic RNA
agaaacctccccgtggccac

SEQ ID NO: 11645 - RNA, 20 nt, Homo sapiens
  source 1..20: mol_type = genomic RNA
gaaacctccccgtggccact

SEQ ID NO: 11646 - RNA, 20 nt, Homo sapiens
  source 1..20: mol_type = genomic RNA
aaacctccccgtggccactc

SEQ ID NO: 11647 - RNA, 20 nt, Homo sapiens
  source 1..20: mol_type = genomic RNA
aacctccccgtggccactcc

SEQ ID NO: 11648 - RNA, 20 nt, Homo sapiens
  source 1..20: mol_type = genomic RNA
acctccccgtggccactcca

SEQ ID NO: 11649 - RNA, 20 nt, Homo sapiens
  source 1..20: mol_type = genomic RNA
cctccccgtggccactccag

SEQ ID NO: 11650 - RNA, 20 nt, Homo sapiens
  source 1..20: mol_type = genomic RNA
ctccccgtggccactccaga

SEQ ID NO: 11651 - RNA, 20 nt, Homo sapiens
  source 1..20: mol_type = genomic RNA
tccccgtggccactccagac

SEQ ID NO: 11652 - RNA, 20 nt, Homo sapiens
  source 1..20: mol_type = genomic RNA
ccccgtggccactccagacc

SEQ ID NO: 11653 - RNA, 20 nt, Homo sapiens
  source 1..20: mol_type = genomic RNA
cccgtggccactccagaccc

SEQ ID NO: 11654 - RNA, 20 nt, Homo sapiens
  source 1..20: mol_type = genomic RNA
ccgtggccactccagaccca

SEQ ID NO: 11655 - RNA, 20 nt, Homo sapiens
  source 1..20: mol_type = genomic RNA
cgtggccactccagacccag

SEQ ID NO: 11656 - RNA, 20 nt, Homo sapiens
  source 1..20: mol_type = genomic RNA
gtggccactccagacccagg

SEQ ID NO: 11657 - RNA, 20 nt, Homo sapiens
  source 1..20: mol_type = genomic RNA
tggccactccagacccagga

SEQ ID NO: 11658 - RNA, 20 nt, Homo sapiens
  source 1..20: mol_type = genomic RNA
ggccactccagacccaggaa

SEQ ID NO: 11659 - RNA, 20 nt, Homo sapiens
  source 1..20: mol_type = genomic RNA
gccactccagacccaggaat

SEQ ID NO: 11660 - RNA, 20 nt, Homo sapiens
  source 1..20: mol_type = genomic RNA
ccactccagacccaggaatg

SEQ ID NO: 11661 - RNA, 20 nt, Homo sapiens
  source 1..20: mol_type = genomic RNA
cactccagacccaggaatgt

SEQ ID NO: 11662 - RNA, 20 nt, Homo sapiens
  source 1..20: mol_type = genomic RNA
actccagacccaggaatgtt

SEQ ID NO: 11663 - RNA, 20 nt, Homo sapiens
  source 1..20: mol_type = genomic RNA
ctccagacccaggaatgttc

SEQ ID NO: 11664 - RNA, 20 nt, Homo sapiens
  source 1..20: mol_type = genomic RNA
tccagacccaggaatgttcc

SEQ ID NO: 11665 - RNA, 20 nt, Homo sapiens
  source 1..20: mol_type = genomic RNA
ccagacccaggaatgttccc

SEQ ID NO: 11666 - RNA, 20 nt, Homo sapiens
  source 1..20: mol_type = genomic RNA
cagacccaggaatgttccca

SEQ ID NO: 11667 - RNA, 20 nt, Homo sapiens
  source 1..20: mol_type = genomic RNA
agacccaggaatgttcccat

SEQ ID NO: 11668 - RNA, 20 nt, Homo sapiens
  source 1..20: mol_type = genomic RNA
gacccaggaatgttcccatg

SEQ ID NO: 11669 - RNA, 20 nt, Homo sapiens
  source 1..20: mol_type = genomic RNA
acccaggaatgttcccatgc

SEQ ID NO: 11670 - RNA, 20 nt, Homo sapiens
  source 1..20: mol_type = genomic RNA
cccaggaatgttcccatgcc

SEQ ID NO: 11671 - RNA, 20 nt, Homo sapiens
  source 1..20: mol_type = genomic RNA
ccaggaatgttcccatgcct

SEQ ID NO: 11672 - RNA, 20 nt, Homo sapiens
  source 1..20: mol_type = genomic RNA
caggaatgttcccatgcctt

SEQ ID NO: 11673 - RNA, 20 nt, Homo sapiens
  source 1..20: mol_type = genomic RNA
aggaatgttcccatgccttc

SEQ ID NO: 11674 - RNA, 20 nt, Homo sapiens
  source 1..20: mol_type = genomic RNA
ggaatgttcccatgccttca

SEQ ID NO: 11675 - RNA, 20 nt, Homo sapiens
  source 1..20: mol_type = genomic RNA
gaatgttcccatgccttcac

SEQ ID NO: 11676 - RNA, 20 nt, Homo sapiens
  source 1..20: mol_type = genomic RNA
aatgttcccatgccttcacc

SEQ ID NO: 11677 - RNA, 20 nt, Homo sapiens
  source 1..20: mol_type = genomic RNA
atgttcccatgccttcacca

SEQ ID NO: 11678 - RNA, 20 nt, Homo sapiens
  source 1..20: mol_type = genomic RNA
tgttcccatgccttcaccac

SEQ ID NO: 11679 - RNA, 20 nt, Homo sapiens
  source 1..20: mol_type = genomic RNA
gttcccatgccttcaccact

SEQ ID NO: 11680 - RNA, 20 nt, Homo sapiens
  source 1..20: mol_type = genomic RNA
ttcccatgccttcaccactc

SEQ ID NO: 11681 - RNA, 20 nt, Homo sapiens
  source 1..20: mol_type = genomic RNA
tcccatgccttcaccactcc

SEQ ID NO: 11682 - RNA, 20 nt, Homo sapiens
  source 1..20: mol_type = genomic RNA
cccatgccttcaccactccc

SEQ ID NO: 11683 - RNA, 20 nt, Homo sapiens
  source 1..20: mol_type = genomic RNA
ccatgccttcaccactccca

SEQ ID NO: 11684 - RNA, 20 nt, Homo sapiens
  source 1..20: mol_type = genomic RNA
catgccttcaccactcccaa

SEQ ID NO: 11685 - RNA, 20 nt, Homo sapiens
  source 1..20: mol_type = genomic RNA
atgccttcaccactcccaaa

SEQ ID NO: 11686 - RNA, 20 nt, Homo sapiens
  source 1..20: mol_type = genomic RNA
tgccttcaccactcccaaaa

SEQ ID NO: 11687 - RNA, 20 nt, Homo sapiens
  source 1..20: mol_type = genomic RNA
gccttcaccactcccaaaac

SEQ ID NO: 11688 - RNA, 20 nt, Homo sapiens
  source 1..20: mol_type = genomic RNA
ccttcaccactcccaaaacc

SEQ ID NO: 11689 - RNA, 20 nt, Homo sapiens
  source 1..20: mol_type = genomic RNA
cttcaccactcccaaaacct

SEQ ID NO: 11690 - RNA, 20 nt, Homo sapiens
  source 1..20: mol_type = genomic RNA
ttcaccactcccaaaacctg

SEQ ID NO: 11691 - RNA, 20 nt, Homo sapiens
  source 1..20: mol_type = genomic RNA
tcaccactcccaaaacctgc

SEQ ID NO: 11692 - RNA, 20 nt, Homo sapiens
  source 1..20: mol_type = genomic RNA
caccactcccaaaacctgct

SEQ ID NO: 11693 - RNA, 20 nt, Homo sapiens
  source 1..20: mol_type = genomic RNA
accactcccaaaacctgctg

SEQ ID NO: 11694 - RNA, 20 nt, Homo sapiens
  source 1..20: mol_type = genomic RNA
ccactcccaaaacctgctga

SEQ ID NO: 11695 - RNA, 20 nt, Homo sapiens
  source 1..20: mol_type = genomic RNA
cactcccaaaacctgctgag

SEQ ID NO: 11696 - RNA, 20 nt, Homo sapiens
  source 1..20: mol_type = genomic RNA
actcccaaaacctgctgagg

SEQ ID NO: 11697 - RNA, 20 nt, Homo sapiens
  source 1..20: mol_type = genomic RNA
ctcccaaaacctgctgaggg

SEQ ID NO: 11698 - RNA, 20 nt, Homo sapiens
  source 1..20: mol_type = genomic RNA
tcccaaaacctgctgagggc

SEQ ID NO: 11699 - RNA, 20 nt, Homo sapiens
  source 1..20: mol_type = genomic RNA
cccaaaacctgctgagggcc

SEQ ID NO: 11700 - RNA, 20 nt, Homo sapiens
  source 1..20: mol_type = genomic RNA
ccaaaacctgctgagggccg

SEQ ID NO: 11701 - RNA, 20 nt, Homo sapiens
  source 1..20: mol_type = genomic RNA
caaaacctgctgagggccgt

SEQ ID NO: 11702 - RNA, 20 nt, Homo sapiens
  source 1..20: mol_type = genomic RNA
aaaacctgctgagggccgtc

SEQ ID NO: 11703 - RNA, 20 nt, Homo sapiens
  source 1..20: mol_type = genomic RNA
aaacctgctgagggccgtca

SEQ ID NO: 11704 - RNA, 20 nt, Homo sapiens
  source 1..20: mol_type = genomic RNA
aacctgctgagggccgtcag

SEQ ID NO: 11705 - RNA, 20 nt, Homo sapiens
  source 1..20: mol_type = genomic RNA
acctgctgagggccgtcagc

SEQ ID NO: 11706 - RNA, 20 nt, Homo sapiens
  source 1..20: mol_type = genomic RNA
cctgctgagggccgtcagca

SEQ ID NO: 11707 - RNA, 20 nt, Homo sapiens
  source 1..20: mol_type = genomic RNA
ctgctgagggccgtcagcaa

SEQ ID NO: 11708 - RNA, 20 nt, Homo sapiens
  source 1..20: mol_type = genomic RNA
tgctgagggccgtcagcaac

SEQ ID NO: 11709 - RNA, 20 nt, Homo sapiens
  source 1..20: mol_type = genomic RNA
gctgagggccgtcagcaaca

SEQ ID NO: 11710 - RNA, 20 nt, Homo sapiens
  source 1..20: mol_type = genomic RNA
ctgagggccgtcagcaacat

SEQ ID NO: 11711 - RNA, 20 nt, Homo sapiens
  source 1..20: mol_type = genomic RNA
tgagggccgtcagcaacatg

SEQ ID NO: 11712 - RNA, 20 nt, Homo sapiens
  source 1..20: mol_type = genomic RNA
gagggccgtcagcaacatgc

SEQ ID NO: 11713 - RNA, 20 nt, Homo sapiens
  source 1..20: mol_type = genomic RNA
agggccgtcagcaacatgct

SEQ ID NO: 11714 - RNA, 20 nt, Homo sapiens
  source 1..20: mol_type = genomic RNA
gggccgtcagcaacatgctc

SEQ ID NO: 11715 - RNA, 20 nt, Homo sapiens
  source 1..20: mol_type = genomic RNA
ggccgtcagcaacatgctcc

SEQ ID NO: 11716 - RNA, 20 nt, Homo sapiens
  source 1..20: mol_type = genomic RNA
gccgtcagcaacatgctcca

SEQ ID NO: 11717 - RNA, 20 nt, Homo sapiens
  source 1..20: mol_type = genomic RNA
ccgtcagcaacatgctccag

SEQ ID NO: 11718 - RNA, 20 nt, Homo sapiens
  source 1..20: mol_type = genomic RNA
cgtcagcaacatgctccaga

SEQ ID NO: 11719 - RNA, 20 nt, Homo sapiens
  source 1..20: mol_type = genomic RNA
gtcagcaacatgctccagaa

SEQ ID NO: 11720 - RNA, 20 nt, Homo sapiens
  source 1..20: mol_type = genomic RNA
tcagcaacatgctccagaag

SEQ ID NO: 11721 - RNA, 20 nt, Homo sapiens
  source 1..20: mol_type = genomic RNA
cagcaacatgctccagaagg

SEQ ID NO: 11722 - RNA, 20 nt, Homo sapiens
  source 1..20: mol_type = genomic RNA
agcaacatgctccagaaggc

SEQ ID NO: 11723 - RNA, 20 nt, Homo sapiens
  source 1..20: mol_type = genomic RNA
gcaacatgctccagaaggcc

SEQ ID NO: 11724 - RNA, 20 nt, Homo sapiens
  source 1..20: mol_type = genomic RNA
caacatgctccagaaggcca

SEQ ID NO: 11725 - RNA, 20 nt, Homo sapiens
  source 1..20: mol_type = genomic RNA
aacatgctccagaaggccag

SEQ ID NO: 11726 - RNA, 20 nt, Homo sapiens
  source 1..20: mol_type = genomic RNA
acatgctccagaaggccaga

SEQ ID NO: 11727 - RNA, 20 nt, Homo sapiens
  source 1..20: mol_type = genomic RNA
catgctccagaaggccagac

SEQ ID NO: 11728 - RNA, 20 nt, Homo sapiens
  source 1..20: mol_type = genomic RNA
atgctccagaaggccagaca

SEQ ID NO: 11729 - RNA, 20 nt, Homo sapiens
  source 1..20: mol_type = genomic RNA
tgctccagaaggccagacaa

SEQ ID NO: 11730 - RNA, 20 nt, Homo sapiens
  source 1..20: mol_type = genomic RNA
gctccagaaggccagacaaa

SEQ ID NO: 11731 - RNA, 20 nt, Homo sapiens
  source 1..20: mol_type = genomic RNA
ctccagaaggccagacaaac

SEQ ID NO: 11732 - RNA, 20 nt, Homo sapiens
  source 1..20: mol_type = genomic RNA
tccagaaggccagacaaact

SEQ ID NO: 11733 - RNA, 20 nt, Homo sapiens
  source 1..20: mol_type = genomic RNA
ccagaaggccagacaaactc

SEQ ID NO: 11734 - RNA, 20 nt, Homo sapiens
  source 1..20: mol_type = genomic RNA
cagaaggccagacaaactct

SEQ ID NO: 11735 - RNA, 20 nt, Homo sapiens
  source 1..20: mol_type = genomic RNA
agaaggccagacaaactcta

SEQ ID NO: 11736 - RNA, 20 nt, Homo sapiens
  source 1..20: mol_type = genomic RNA
gaaggccagacaaactctag

SEQ ID NO: 11737 - RNA, 20 nt, Homo sapiens
  source 1..20: mol_type = genomic RNA
aaggccagacaaactctaga

SEQ ID NO: 11738 - RNA, 20 nt, Homo sapiens
  source 1..20: mol_type = genomic RNA
aggccagacaaactctagaa

SEQ ID NO: 11739 - RNA, 20 nt, Homo sapiens
  source 1..20: mol_type = genomic RNA
ggccagacaaactctagaat

SEQ ID NO: 11740 - RNA, 20 nt, Homo sapiens
  source 1..20: mol_type = genomic RNA
gccagacaaactctagaatt

SEQ ID NO: 11741 - RNA, 20 nt, Homo sapiens
  source 1..20: mol_type = genomic RNA
ccagacaaactctagaattt

SEQ ID NO: 11742 - RNA, 20 nt, Homo sapiens
  source 1..20: mol_type = genomic RNA
cagacaaactctagaatttt

SEQ ID NO: 11743 - RNA, 20 nt, Homo sapiens
  source 1..20: mol_type = genomic RNA
agacaaactctagaatttta

SEQ ID NO: 11744 - RNA, 20 nt, Homo sapiens
  source 1..20: mol_type = genomic RNA
gacaaactctagaattttac

SEQ ID NO: 11745 - RNA, 20 nt, Homo sapiens
  source 1..20: mol_type = genomic RNA
acaaactctagaattttacc

SEQ ID NO: 11746 - RNA, 20 nt, Homo sapiens
  source 1..20: mol_type = genomic RNA
caaactctagaattttaccc

SEQ ID NO: 11747 - RNA, 20 nt, Homo sapiens
  source 1..20: mol_type = genomic RNA
aaactctagaattttaccct

SEQ ID NO: 11748 - RNA, 20 nt, Homo sapiens
  source 1..20: mol_type = genomic RNA
aactctagaattttaccctt

SEQ ID NO: 11749 - RNA, 20 nt, Homo sapiens
  source 1..20: mol_type = genomic RNA
actctagaattttacccttg

SEQ ID NO: 11750 - RNA, 20 nt, Homo sapiens
  source 1..20: mol_type = genomic RNA
ctctagaattttacccttgc

SEQ ID NO: 11751 - RNA, 20 nt, Homo sapiens
  source 1..20: mol_type = genomic RNA
tctagaattttacccttgca

SEQ ID NO: 11752 - RNA, 20 nt, Homo sapiens
  source 1..20: mol_type = genomic RNA
ctagaattttacccttgcac

SEQ ID NO: 11753 - RNA, 20 nt, Homo sapiens
  source 1..20: mol_type = genomic RNA
tagaattttacccttgcact

SEQ ID NO: 11754 - RNA, 20 nt, Homo sapiens
  source 1..20: mol_type = genomic RNA
agaattttacccttgcactt

SEQ ID NO: 11755 - RNA, 20 nt, Homo sapiens
  source 1..20: mol_type = genomic RNA
gaattttacccttgcacttc

SEQ ID NO: 11756 - RNA, 20 nt, Homo sapiens
  source 1..20: mol_type = genomic RNA
aattttacccttgcacttct

SEQ ID NO: 11757 - RNA, 20 nt, Homo sapiens
  source 1..20: mol_type = genomic RNA
attttacccttgcacttctg

SEQ ID NO: 11758 - RNA, 20 nt, Homo sapiens
  source 1..20: mol_type = genomic RNA
ttttacccttgcacttctga

SEQ ID NO: 11759 - RNA, 20 nt, Homo sapiens
  source 1..20: mol_type = genomic RNA
tttacccttgcacttctgaa

SEQ ID NO: 11760 - RNA, 20 nt, Homo sapiens
  source 1..20: mol_type = genomic RNA
ttacccttgcacttctgaag

SEQ ID NO: 11761 - RNA, 20 nt, Homo sapiens
  source 1..20: mol_type = genomic RNA
tacccttgcacttctgaaga

SEQ ID NO: 11762 - RNA, 20 nt, Homo sapiens
  source 1..20: mol_type = genomic RNA
acccttgcacttctgaagag

SEQ ID NO: 11763 - RNA, 20 nt, Homo sapiens
  source 1..20: mol_type = genomic RNA
cccttgcacttctgaagaga

SEQ ID NO: 11764 - RNA, 20 nt, Homo sapiens
  source 1..20: mol_type = genomic RNA
ccttgcacttctgaagagat

SEQ ID NO: 11765 - RNA, 20 nt, Homo sapiens
  source 1..20: mol_type = genomic RNA
cttgcacttctgaagagatt

SEQ ID NO: 11766 - RNA, 20 nt, Homo sapiens
  source 1..20: mol_type = genomic RNA
ttgcacttctgaagagattg

SEQ ID NO: 11767 - RNA, 20 nt, Homo sapiens
  source 1..20: mol_type = genomic RNA
tgcacttctgaagagattga

SEQ ID NO: 11768 - RNA, 20 nt, Homo sapiens
  source 1..20: mol_type = genomic RNA
gcacttctgaagagattgat

SEQ ID NO: 11769 - RNA, 20 nt, Homo sapiens
  source 1..20: mol_type = genomic RNA
cacttctgaagagattgatc

SEQ ID NO: 11770 - RNA, 20 nt, Homo sapiens
  source 1..20: mol_type = genomic RNA
acttctgaagagattgatca

SEQ ID NO: 11771 - RNA, 20 nt, Homo sapiens
  source 1..20: mol_type = genomic RNA
cttctgaagagattgatcat

SEQ ID NO: 11772 - RNA, 20 nt, Homo sapiens
  source 1..20: mol_type = genomic RNA
ttctgaagagattgatcatg

SEQ ID NO: 11773 - RNA, 20 nt, Homo sapiens
  source 1..20: mol_type = genomic RNA
tctgaagagattgatcatga

SEQ ID NO: 11774 - RNA, 20 nt, Homo sapiens
  source 1..20: mol_type = genomic RNA
ctgaagagattgatcatgaa

SEQ ID NO: 11775 - RNA, 20 nt, Homo sapiens
  source 1..20: mol_type = genomic RNA
tgaagagattgatcatgaag

SEQ ID NO: 11776 - RNA, 20 nt, Homo sapiens
  source 1..20: mol_type = genomic RNA
gaagagattgatcatgaaga

SEQ ID NO: 11777 - RNA, 20 nt, Homo sapiens
  source 1..20: mol_type = genomic RNA
aagagattgatcatgaagat

SEQ ID NO: 11778 - RNA, 20 nt, Homo sapiens
  source 1..20: mol_type = genomic RNA
agagattgatcatgaagata

SEQ ID NO: 11779 - RNA, 20 nt, Homo sapiens
  source 1..20: mol_type = genomic RNA
gagattgatcatgaagatat

SEQ ID NO: 11780 - RNA, 20 nt, Homo sapiens
  source 1..20: mol_type = genomic RNA
agattgatcatgaagatatc

SEQ ID NO: 11781 - RNA, 20 nt, Homo sapiens
  source 1..20: mol_type = genomic RNA
gattgatcatgaagatatca

SEQ ID NO: 11782 - RNA, 20 nt, Homo sapiens
  source 1..20: mol_type = genomic RNA
attgatcatgaagatatcac

SEQ ID NO: 11783 - RNA, 20 nt, Homo sapiens
  source 1..20: mol_type = genomic RNA
ttgatcatgaagatatcaca

SEQ ID NO: 11784 - RNA, 20 nt, Homo sapiens
  source 1..20: mol_type = genomic RNA
tgatcatgaagatatcacaa

SEQ ID NO: 11785 - RNA, 20 nt, Homo sapiens
  source 1..20: mol_type = genomic RNA
gatcatgaagatatcacaaa

SEQ ID NO: 11786 - RNA, 20 nt, Homo sapiens
  source 1..20: mol_type = genomic RNA
atcatgaagatatcacaaaa

SEQ ID NO: 11787 - RNA, 20 nt, Homo sapiens
  source 1..20: mol_type = genomic RNA
tcatgaagatatcacaaaag

SEQ ID NO: 11788 - RNA, 20 nt, Homo sapiens
  source 1..20: mol_type = genomic RNA
catgaagatatcacaaaaga

SEQ ID NO: 11789 - RNA, 20 nt, Homo sapiens
  source 1..20: mol_type = genomic RNA
atgaagatatcacaaaagat

SEQ ID NO: 11790 - RNA, 20 nt, Homo sapiens
  source 1..20: mol_type = genomic RNA
tgaagatatcacaaaagata

SEQ ID NO: 11791 - RNA, 20 nt, Homo sapiens
  source 1..20: mol_type = genomic RNA
gaagatatcacaaaagataa

SEQ ID NO: 11792 - RNA, 20 nt, Homo sapiens
  source 1..20: mol_type = genomic RNA
aagatatcacaaaagataaa

SEQ ID NO: 11793 - RNA, 20 nt, Homo sapiens
  source 1..20: mol_type = genomic RNA
agatatcacaaaagataaaa

SEQ ID NO: 11794 - RNA, 20 nt, Homo sapiens
  source 1..20: mol_type = genomic RNA
gatatcacaaaagataaaac

SEQ ID NO: 11795 - RNA, 20 nt, Homo sapiens
  source 1..20: mol_type = genomic RNA
atatcacaaaagataaaacc

SEQ ID NO: 11796 - RNA, 20 nt, Homo sapiens
  source 1..20: mol_type = genomic RNA
tatcacaaaagataaaacca

SEQ ID NO: 11797 - RNA, 20 nt, Homo sapiens
  source 1..20: mol_type = genomic RNA
atcacaaaagataaaaccag

SEQ ID NO: 11798 - RNA, 20 nt, Homo sapiens
  source 1..20: mol_type = genomic RNA
tcacaaaagataaaaccagc

SEQ ID NO: 11799 - RNA, 20 nt, Homo sapiens
  source 1..20: mol_type = genomic RNA
cacaaaagataaaaccagca

SEQ ID NO: 11800 - RNA, 20 nt, Homo sapiens
  source 1..20: mol_type = genomic RNA
acaaaagataaaaccagcac

SEQ ID NO: 11801 - RNA, 20 nt, Homo sapiens
  source 1..20: mol_type = genomic RNA
caaaagataaaaccagcaca

SEQ ID NO: 11802 - RNA, 20 nt, Homo sapiens
  source 1..20: mol_type = genomic RNA
aaaagataaaaccagcacag

SEQ ID NO: 11803 - RNA, 20 nt, Homo sapiens
  source 1..20: mol_type = genomic RNA
aaagataaaaccagcacagt

SEQ ID NO: 11804 - RNA, 20 nt, Homo sapiens
  source 1..20: mol_type = genomic RNA
aagataaaaccagcacagtg

SEQ ID NO: 11805 - RNA, 20 nt, Homo sapiens
  source 1..20: mol_type = genomic RNA
agataaaaccagcacagtgg

SEQ ID NO: 11806 - RNA, 20 nt, Homo sapiens
  source 1..20: mol_type = genomic RNA
gataaaaccagcacagtgga

SEQ ID NO: 11807 - RNA, 20 nt, Homo sapiens
  source 1..20: mol_type = genomic RNA
ataaaaccagcacagtggag

SEQ ID NO: 11808 - RNA, 20 nt, Homo sapiens
  source 1..20: mol_type = genomic RNA
taaaaccagcacagtggagg

SEQ ID NO: 11809 - RNA, 20 nt, Homo sapiens
  source 1..20: mol_type = genomic RNA
aaaaccagcacagtggaggc

SEQ ID NO: 11810 - RNA, 20 nt, Homo sapiens
  source 1..20: mol_type = genomic RNA
aaaccagcacagtggaggcc

SEQ ID NO: 11811 - RNA, 20 nt, Homo sapiens
  source 1..20: mol_type = genomic RNA
aaccagcacagtggaggcct

SEQ ID NO: 11812 - RNA, 20 nt, Homo sapiens
  source 1..20: mol_type = genomic RNA
accagcacagtggaggcctg

SEQ ID NO: 11813 - RNA, 20 nt, Homo sapiens
  source 1..20: mol_type = genomic RNA
ccagcacagtggaggcctgt

SEQ ID NO: 11814 - RNA, 20 nt, Homo sapiens
  source 1..20: mol_type = genomic RNA
cagcacagtggaggcctgtt

SEQ ID NO: 11815 - RNA, 20 nt, Homo sapiens
  source 1..20: mol_type = genomic RNA
agcacagtggaggcctgttt

SEQ ID NO: 11816 - RNA, 20 nt, Homo sapiens
  source 1..20: mol_type = genomic RNA
gcacagtggaggcctgttta

SEQ ID NO: 11817 - RNA, 20 nt, Homo sapiens
  source 1..20: mol_type = genomic RNA
cacagtggaggcctgtttac

SEQ ID NO: 11818 - RNA, 20 nt, Homo sapiens
  source 1..20: mol_type = genomic RNA
acagtggaggcctgtttacc

SEQ ID NO: 11819 - RNA, 20 nt, Homo sapiens
  source 1..20: mol_type = genomic RNA
cagtggaggcctgtttacca

SEQ ID NO: 11820 - RNA, 20 nt, Homo sapiens
  source 1..20: mol_type = genomic RNA
agtggaggcctgtttaccat

SEQ ID NO: 11821 - RNA, 20 nt, Homo sapiens
  source 1..20: mol_type = genomic RNA
gtggaggcctgtttaccatt

SEQ ID NO: 11822 - RNA, 20 nt, Homo sapiens
  source 1..20: mol_type = genomic RNA
tggaggcctgtttaccattg

SEQ ID NO: 11823 - RNA, 20 nt, Homo sapiens
  source 1..20: mol_type = genomic RNA
ggaggcctgtttaccattgg

SEQ ID NO: 11824 - RNA, 20 nt, Homo sapiens
  source 1..20: mol_type = genomic RNA
gaggcctgtttaccattgga

SEQ ID NO: 11825 - RNA, 20 nt, Homo sapiens
  source 1..20: mol_type = genomic RNA
aggcctgtttaccattggaa

SEQ ID NO: 11826 - RNA, 20 nt, Homo sapiens
  source 1..20: mol_type = genomic RNA
ggcctgtttaccattggaat

SEQ ID NO: 11827 - RNA, 20 nt, Homo sapiens
  source 1..20: mol_type = genomic RNA
gcctgtttaccattggaatt

SEQ ID NO: 11828 - RNA, 20 nt, Homo sapiens
  source 1..20: mol_type = genomic RNA
cctgtttaccattggaatta

SEQ ID NO: 11829 - RNA, 20 nt, Homo sapiens
  source 1..20: mol_type = genomic RNA
ctgtttaccattggaattaa

SEQ ID NO: 11830 - RNA, 20 nt, Homo sapiens
  source 1..20: mol_type = genomic RNA
tgtttaccattggaattaac

SEQ ID NO: 11831 - RNA, 20 nt, Homo sapiens
  source 1..20: mol_type = genomic RNA
gtttaccattggaattaacc

SEQ ID NO: 11832 - RNA, 20 nt, Homo sapiens
  source 1..20: mol_type = genomic RNA
tttaccattggaattaacca

SEQ ID NO: 11833 - RNA, 20 nt, Homo sapiens
  source 1..20: mol_type = genomic RNA
ttaccattggaattaaccaa

SEQ ID NO: 11834 - RNA, 20 nt, Homo sapiens
  source 1..20: mol_type = genomic RNA
taccattggaattaaccaag

SEQ ID NO: 11835 - RNA, 20 nt, Homo sapiens
  source 1..20: mol_type = genomic RNA
accattggaattaaccaaga

SEQ ID NO: 11836 - RNA, 20 nt, Homo sapiens
  source 1..20: mol_type = genomic RNA
ccattggaattaaccaagaa

SEQ ID NO: 11837 - RNA, 20 nt, Homo sapiens
  source 1..20: mol_type = genomic RNA
cattggaattaaccaagaat

SEQ ID NO: 11838 - RNA, 20 nt, Homo sapiens
  source 1..20: mol_type = genomic RNA
attggaattaaccaagaatg

SEQ ID NO: 11839 - RNA, 20 nt, Homo sapiens
  source 1..20: mol_type = genomic RNA
ttggaattaaccaagaatga

SEQ ID NO: 11840 - RNA, 20 nt, Homo sapiens
  source 1..20: mol_type = genomic RNA
tggaattaaccaagaatgag

SEQ ID NO: 11841 - RNA, 20 nt, Homo sapiens
  source 1..20: mol_type = genomic RNA
ggaattaaccaagaatgaga

SEQ ID NO: 11842 - RNA, 20 nt, Homo sapiens
  source 1..20: mol_type = genomic RNA
gaattaaccaagaatgagag

SEQ ID NO: 11843 - RNA, 20 nt, Homo sapiens
  source 1..20: mol_type = genomic RNA
aattaaccaagaatgagagt

SEQ ID NO: 11844 - RNA, 20 nt, Homo sapiens
  source 1..20: mol_type = genomic RNA
attaaccaagaatgagagtt

SEQ ID NO: 11845 - RNA, 20 nt, Homo sapiens
  source 1..20: mol_type = genomic RNA
ttaaccaagaatgagagttg

SEQ ID NO: 11846 - RNA, 20 nt, Homo sapiens
  source 1..20: mol_type = genomic RNA
taaccaagaatgagagttgc

SEQ ID NO: 11847 - RNA, 20 nt, Homo sapiens
  source 1..20: mol_type = genomic RNA
aaccaagaatgagagttgcc

SEQ ID NO: 11848 - RNA, 20 nt, Homo sapiens
  source 1..20: mol_type = genomic RNA
accaagaatgagagttgcct

SEQ ID NO: 11849 - RNA, 20 nt, Homo sapiens
  source 1..20: mol_type = genomic RNA
ccaagaatgagagttgccta

SEQ ID NO: 11850 - RNA, 20 nt, Homo sapiens
  source 1..20: mol_type = genomic RNA
caagaatgagagttgcctaa

SEQ ID NO: 11851 - RNA, 20 nt, Homo sapiens
  source 1..20: mol_type = genomic RNA
aagaatgagagttgcctaaa

SEQ ID NO: 11852 - RNA, 20 nt, Homo sapiens
  source 1..20: mol_type = genomic RNA
agaatgagagttgcctaaat

SEQ ID NO: 11853 - RNA, 20 nt, Homo sapiens
  source 1..20: mol_type = genomic RNA
gaatgagagttgcctaaatt

SEQ ID NO: 11854 - RNA, 20 nt, Homo sapiens
  source 1..20: mol_type = genomic RNA
aatgagagttgcctaaattc

SEQ ID NO: 11855 - RNA, 20 nt, Homo sapiens
  source 1..20: mol_type = genomic RNA
atgagagttgcctaaattcc

SEQ ID NO: 11856 - RNA, 20 nt, Homo sapiens
  source 1..20: mol_type = genomic RNA
tgagagttgcctaaattcca

SEQ ID NO: 11857 - RNA, 20 nt, Homo sapiens
  source 1..20: mol_type = genomic RNA
gagagttgcctaaattccag

SEQ ID NO: 11858 - RNA, 20 nt, Homo sapiens
  source 1..20: mol_type = genomic RNA
agagttgcctaaattccaga

SEQ ID NO: 11859 - RNA, 20 nt, Homo sapiens
  source 1..20: mol_type = genomic RNA
gagttgcctaaattccagag

SEQ ID NO: 11860 - RNA, 20 nt, Homo sapiens
  source 1..20: mol_type = genomic RNA
agttgcctaaattccagaga

SEQ ID NO: 11861 - RNA, 20 nt, Homo sapiens
  source 1..20: mol_type = genomic RNA
gttgcctaaattccagagag

SEQ ID NO: 11862 - RNA, 20 nt, Homo sapiens
  source 1..20: mol_type = genomic RNA
ttgcctaaattccagagaga

SEQ ID NO: 11863 - RNA, 20 nt, Homo sapiens
  source 1..20: mol_type = genomic RNA
tgcctaaattccagagagac

SEQ ID NO: 11864 - RNA, 20 nt, Homo sapiens
  source 1..20: mol_type = genomic RNA
gcctaaattccagagagacc

SEQ ID NO: 11865 - RNA, 20 nt, Homo sapiens
  source 1..20: mol_type = genomic RNA
cctaaattccagagagacct

SEQ ID NO: 11866 - RNA, 20 nt, Homo sapiens
  source 1..20: mol_type = genomic RNA
ctaaattccagagagacctc

SEQ ID NO: 11867 - RNA, 20 nt, Homo sapiens
  source 1..20: mol_type = genomic RNA
taaattccagagagacctct

SEQ ID NO: 11868 - RNA, 20 nt, Homo sapiens
  source 1..20: mol_type = genomic RNA
aaattccagagagacctctt

SEQ ID NO: 11869 - RNA, 20 nt, Homo sapiens
  source 1..20: mol_type = genomic RNA
aattccagagagacctcttt

SEQ ID NO: 11870 - RNA, 20 nt, Homo sapiens
  source 1..20: mol_type = genomic RNA
attccagagagacctctttc

SEQ ID NO: 11871 - RNA, 20 nt, Homo sapiens
  source 1..20: mol_type = genomic RNA
ttccagagagacctctttca

SEQ ID NO: 11872 - RNA, 20 nt, Homo sapiens
  source 1..20: mol_type = genomic RNA
tccagagagacctctttcat

SEQ ID NO: 11873 - RNA, 20 nt, Homo sapiens
  source 1..20: mol_type = genomic RNA
ccagagagacctctttcata

SEQ ID NO: 11874 - RNA, 20 nt, Homo sapiens
  source 1..20: mol_type = genomic RNA
cagagagacctctttcataa

SEQ ID NO: 11875 - RNA, 20 nt, Homo sapiens
  source 1..20: mol_type = genomic RNA
agagagacctctttcataac

SEQ ID NO: 11876 - RNA, 20 nt, Homo sapiens
  source 1..20: mol_type = genomic RNA
gagagacctctttcataact

SEQ ID NO: 11877 - RNA, 20 nt, Homo sapiens
  source 1..20: mol_type = genomic RNA
agagacctctttcataacta

SEQ ID NO: 11878 - RNA, 20 nt, Homo sapiens
  source 1..20: mol_type = genomic RNA
gagacctctttcataactaa

SEQ ID NO: 11879 - RNA, 20 nt, Homo sapiens
  source 1..20: mol_type = genomic RNA
agacctctttcataactaat

SEQ ID NO: 11880 - RNA, 20 nt, Homo sapiens
  source 1..20: mol_type = genomic RNA
gacctctttcataactaatg

SEQ ID NO: 11881 - RNA, 20 nt, Homo sapiens
  source 1..20: mol_type = genomic RNA
acctctttcataactaatgg

SEQ ID NO: 11882 - RNA, 20 nt, Homo sapiens
  source 1..20: mol_type = genomic RNA
cctctttcataactaatggg

SEQ ID NO: 11883 - RNA, 20 nt, Homo sapiens
  source 1..20: mol_type = genomic RNA
ctctttcataactaatggga

SEQ ID NO: 11884 - RNA, 20 nt, Homo sapiens
  source 1..20: mol_type = genomic RNA
tctttcataactaatgggag

SEQ ID NO: 11885 - RNA, 20 nt, Homo sapiens
  source 1..20: mol_type = genomic RNA
ctttcataactaatgggagt

SEQ ID NO: 11886 - RNA, 20 nt, Homo sapiens
  source 1..20: mol_type = genomic RNA
tttcataactaatgggagtt

SEQ ID NO: 11887 - RNA, 20 nt, Homo sapiens
  source 1..20: mol_type = genomic RNA
ttcataactaatgggagttg

SEQ ID NO: 11888 - RNA, 20 nt, Homo sapiens
  source 1..20: mol_type = genomic RNA
tcataactaatgggagttgc

SEQ ID NO: 11889 - RNA, 20 nt, Homo sapiens
  source 1..20: mol_type = genomic RNA
cataactaatgggagttgcc

SEQ ID NO: 11890 - RNA, 20 nt, Homo sapiens
  source 1..20: mol_type = genomic RNA
ataactaatgggagttgcct

SEQ ID NO: 11891 - RNA, 20 nt, Homo sapiens
  source 1..20: mol_type = genomic RNA
taactaatgggagttgcctg

SEQ ID NO: 11892 - RNA, 20 nt, Homo sapiens
  source 1..20: mol_type = genomic RNA
aactaatgggagttgcctgg

SEQ ID NO: 11893 - RNA, 20 nt, Homo sapiens
  source 1..20: mol_type = genomic RNA
actaatgggagttgcctggc

SEQ ID NO: 11894 - RNA, 20 nt, Homo sapiens
  source 1..20: mol_type = genomic RNA
ctaatgggagttgcctggcc

SEQ ID NO: 11895 - RNA, 20 nt, Homo sapiens
  source 1..20: mol_type = genomic RNA
taatgggagttgcctggcct

SEQ ID NO: 11896 - RNA, 20 nt, Homo sapiens
  source 1..20: mol_type = genomic RNA
aatgggagttgcctggcctc

SEQ ID NO: 11897 - RNA, 20 nt, Homo sapiens
  source 1..20: mol_type = genomic RNA
atgggagttgcctggcctcc

SEQ ID NO: 11898 - RNA, 20 nt, Homo sapiens
  source 1..20: mol_type = genomic RNA
tgggagttgcctggcctcca

SEQ ID NO: 11899 - RNA, 20 nt, Homo sapiens
  source 1..20: mol_type = genomic RNA
gggagttgcctggcctccag

SEQ ID NO: 11900 - RNA, 20 nt, Homo sapiens
  source 1..20: mol_type = genomic RNA
ggagttgcctggcctccaga

SEQ ID NO: 11901 - RNA, 20 nt, Homo sapiens
  source 1..20: mol_type = genomic RNA
gagttgcctggcctccagaa

SEQ ID NO: 11902 - RNA, 20 nt, Homo sapiens
  source 1..20: mol_type = genomic RNA
agttgcctggcctccagaaa

SEQ ID NO: 11903 - RNA, 20 nt, Homo sapiens
  source 1..20: mol_type = genomic RNA
gttgcctggcctccagaaag

SEQ ID NO: 11904 - RNA, 20 nt, Homo sapiens
  source 1..20: mol_type = genomic RNA
ttgcctggcctccagaaaga

SEQ ID NO: 11905 - RNA, 20 nt, Homo sapiens
  source 1..20: mol_type = genomic RNA
tgcctggcctccagaaagac

SEQ ID NO: 11906 - RNA, 20 nt, Homo sapiens
  source 1..20: mol_type = genomic RNA
gcctggcctccagaaagacc

SEQ ID NO: 11907 - RNA, 20 nt, Homo sapiens
  source 1..20: mol_type = genomic RNA
cctggcctccagaaagacct

SEQ ID NO: 11908 - RNA, 20 nt, Homo sapiens
  source 1..20: mol_type = genomic RNA
ctggcctccagaaagacctc

SEQ ID NO: 11909 - RNA, 20 nt, Homo sapiens
  source 1..20: mol_type = genomic RNA
tggcctccagaaagacctct

SEQ ID NO: 11910 - RNA, 20 nt, Homo sapiens
  source 1..20: mol_type = genomic RNA
ggcctccagaaagacctctt

SEQ ID NO: 11911 - RNA, 20 nt, Homo sapiens
  source 1..20: mol_type = genomic RNA
gcctccagaaagacctcttt

SEQ ID NO: 11912 - RNA, 20 nt, Homo sapiens
  source 1..20: mol_type = genomic RNA
cctccagaaagacctctttt

SEQ ID NO: 11913 - RNA, 20 nt, Homo sapiens
  source 1..20: mol_type = genomic RNA
ctccagaaagacctctttta

SEQ ID NO: 11914 - RNA, 20 nt, Homo sapiens
  source 1..20: mol_type = genomic RNA
tccagaaagacctcttttat

SEQ ID NO: 11915 - RNA, 20 nt, Homo sapiens
  source 1..20: mol_type = genomic RNA
ccagaaagacctcttttatg

SEQ ID NO: 11916 - RNA, 20 nt, Homo sapiens
  source 1..20: mol_type = genomic RNA
cagaaagacctcttttatga

SEQ ID NO: 11917 - RNA, 20 nt, Homo sapiens
  source 1..20: mol_type = genomic RNA
agaaagacctcttttatgat

SEQ ID NO: 11918 - RNA, 20 nt, Homo sapiens
  source 1..20: mol_type = genomic RNA
gaaagacctcttttatgatg

SEQ ID NO: 11919 - RNA, 20 nt, Homo sapiens
  source 1..20: mol_type = genomic RNA
aaagacctcttttatgatgg

SEQ ID NO: 11920 - RNA, 20 nt, Homo sapiens
  source 1..20: mol_type = genomic RNA
aagacctcttttatgatggc

SEQ ID NO: 11921 - RNA, 20 nt, Homo sapiens
  source 1..20: mol_type = genomic RNA
agacctcttttatgatggcc

SEQ ID NO: 11922 - RNA, 20 nt, Homo sapiens
  source 1..20: mol_type = genomic RNA
gacctcttttatgatggccc

SEQ ID NO: 11923 - RNA, 20 nt, Homo sapiens
  source 1..20: mol_type = genomic RNA
acctcttttatgatggccct

SEQ ID NO: 11924 - RNA, 20 nt, Homo sapiens
  source 1..20: mol_type = genomic RNA
cctcttttatgatggccctg

SEQ ID NO: 11925 - RNA, 20 nt, Homo sapiens
  source 1..20: mol_type = genomic RNA
ctcttttatgatggccctgt

SEQ ID NO: 11926 - RNA, 20 nt, Homo sapiens
  source 1..20: mol_type = genomic RNA
tcttttatgatggccctgtg

SEQ ID NO: 11927 - RNA, 20 nt, Homo sapiens
  source 1..20: mol_type = genomic RNA
cttttatgatggccctgtgc

SEQ ID NO: 11928 - RNA, 20 nt, Homo sapiens
  source 1..20: mol_type = genomic RNA
ttttatgatggccctgtgcc

SEQ ID NO: 11929 - RNA, 20 nt, Homo sapiens
  source 1..20: mol_type = genomic RNA
tttatgatggccctgtgcct

SEQ ID NO: 11930 - RNA, 20 nt, Homo sapiens
  source 1..20: mol_type = genomic RNA
ttatgatggccctgtgcctt

SEQ ID NO: 11931 - RNA, 20 nt, Homo sapiens
  source 1..20: mol_type = genomic RNA
tatgatggccctgtgcctta

SEQ ID NO: 11932 - RNA, 20 nt, Homo sapiens
  source 1..20: mol_type = genomic RNA
atgatggccctgtgccttag

SEQ ID NO: 11933 - RNA, 20 nt, Homo sapiens
  source 1..20: mol_type = genomic RNA
tgatggccctgtgccttagt

SEQ ID NO: 11934 - RNA, 20 nt, Homo sapiens
  source 1..20: mol_type = genomic RNA
gatggccctgtgccttagta

SEQ ID NO: 11935 - RNA, 20 nt, Homo sapiens
  source 1..20: mol_type = genomic RNA
atggccctgtgccttagtag

SEQ ID NO: 11936 - RNA, 20 nt, Homo sapiens
  source 1..20: mol_type = genomic RNA
tggccctgtgccttagtagt

SEQ ID NO: 11937 - RNA, 20 nt, Homo sapiens
  source 1..20: mol_type = genomic RNA
ggccctgtgccttagtagta

SEQ ID NO: 11938 - RNA, 20 nt, Homo sapiens
  source 1..20: mol_type = genomic RNA
gccctgtgccttagtagtat

SEQ ID NO: 11939 - RNA, 20 nt, Homo sapiens
  source 1..20: mol_type = genomic RNA
ccctgtgccttagtagtatt

SEQ ID NO: 11940 - RNA, 20 nt, Homo sapiens
  source 1..20: mol_type = genomic RNA
cctgtgccttagtagtattt

SEQ ID NO: 11941 - RNA, 20 nt, Homo sapiens
  source 1..20: mol_type = genomic RNA
ctgtgccttagtagtattta

SEQ ID NO: 11942 - RNA, 20 nt, Homo sapiens
  source 1..20: mol_type = genomic RNA
tgtgccttagtagtatttat

SEQ ID NO: 11943 - RNA, 20 nt, Homo sapiens
  source 1..20: mol_type = genomic RNA
gtgccttagtagtatttatg

SEQ ID NO: 11944 - RNA, 20 nt, Homo sapiens
  source 1..20: mol_type = genomic RNA
tgccttagtagtatttatga

SEQ ID NO: 11945 - RNA, 20 nt, Homo sapiens
  source 1..20: mol_type = genomic RNA
gccttagtagtatttatgaa

SEQ ID NO: 11946 - RNA, 20 nt, Homo sapiens
  source 1..20: mol_type = genomic RNA
ccttagtagtatttatgaag

SEQ ID NO: 11947 - RNA, 20 nt, Homo sapiens
  source 1..20: mol_type = genomic RNA
cttagtagtatttatgaaga

SEQ ID NO: 11948 - RNA, 20 nt, Homo sapiens
  source 1..20: mol_type = genomic RNA
ttagtagtatttatgaagac

SEQ ID NO: 11949 - RNA, 20 nt, Homo sapiens
  source 1..20: mol_type = genomic RNA
tagtagtatttatgaagact

SEQ ID NO: 11950 - RNA, 20 nt, Homo sapiens
  source 1..20: mol_type = genomic RNA
agtagtatttatgaagactt

SEQ ID NO: 11951 - RNA, 20 nt, Homo sapiens
  source 1..20: mol_type = genomic RNA
gtagtatttatgaagacttg

SEQ ID NO: 11952 - RNA, 20 nt, Homo sapiens
  source 1..20: mol_type = genomic RNA
tagtatttatgaagacttga

SEQ ID NO: 11953 - RNA, 20 nt, Homo sapiens
  source 1..20: mol_type = genomic RNA
agtatttatgaagacttgaa

SEQ ID NO: 11954 - RNA, 20 nt, Homo sapiens
  source 1..20: mol_type = genomic RNA
gtatttatgaagacttgaag

SEQ ID NO: 11955 - RNA, 20 nt, Homo sapiens
  source 1..20: mol_type = genomic RNA
tatttatgaagacttgaaga

SEQ ID NO: 11956 - RNA, 20 nt, Homo sapiens
  source 1..20: mol_type = genomic RNA
atttatgaagacttgaagat

SEQ ID NO: 11957 - RNA, 20 nt, Homo sapiens
  source 1..20: mol_type = genomic RNA
tttatgaagacttgaagatg

SEQ ID NO: 11958 - RNA, 20 nt, Homo sapiens
  source 1..20: mol_type = genomic RNA
ttatgaagacttgaagatgt

SEQ ID NO: 11959 - RNA, 20 nt, Homo sapiens
  source 1..20: mol_type = genomic RNA
tatgaagacttgaagatgta

SEQ ID NO: 11960 - RNA, 20 nt, Homo sapiens
  source 1..20: mol_type = genomic RNA
atgaagacttgaagatgtac

SEQ ID NO: 11961 - RNA, 20 nt, Homo sapiens
  source 1..20: mol_type = genomic RNA
tgaagacttgaagatgtacc

SEQ ID NO: 11962 - RNA, 20 nt, Homo sapiens
  source 1..20: mol_type = genomic RNA
gaagacttgaagatgtacca

SEQ ID NO: 11963 - RNA, 20 nt, Homo sapiens
  source 1..20: mol_type = genomic RNA
aagacttgaagatgtaccag

SEQ ID NO: 11964 - RNA, 20 nt, Homo sapiens
  source 1..20: mol_type = genomic RNA
agacttgaagatgtaccagg

SEQ ID NO: 11965 - RNA, 20 nt, Homo sapiens
  source 1..20: mol_type = genomic RNA
gacttgaagatgtaccaggt

SEQ ID NO: 11966 - RNA, 20 nt, Homo sapiens
  source 1..20: mol_type = genomic RNA
acttgaagatgtaccaggtg

SEQ ID NO: 11967 - RNA, 20 nt, Homo sapiens
  source 1..20: mol_type = genomic RNA
cttgaagatgtaccaggtgg

SEQ ID NO: 11968 - RNA, 20 nt, Homo sapiens
  source 1..20: mol_type = genomic RNA
ttgaagatgtaccaggtgga

SEQ ID NO: 11969 - RNA, 20 nt, Homo sapiens
  source 1..20: mol_type = genomic RNA
tgaagatgtaccaggtggag

SEQ ID NO: 11970 - RNA, 20 nt, Homo sapiens
  source 1..20: mol_type = genomic RNA
gaagatgtaccaggtggagt

SEQ ID NO: 11971 - RNA, 20 nt, Homo sapiens
  source 1..20: mol_type = genomic RNA
aagatgtaccaggtggagtt

SEQ ID NO: 11972 - RNA, 20 nt, Homo sapiens
  source 1..20: mol_type = genomic RNA
agatgtaccaggtggagttc

SEQ ID NO: 11973 - RNA, 20 nt, Homo sapiens
  source 1..20: mol_type = genomic RNA
gatgtaccaggtggagttca

SEQ ID NO: 11974 - RNA, 20 nt, Homo sapiens
  source 1..20: mol_type = genomic RNA
atgtaccaggtggagttcaa

SEQ ID NO: 11975 - RNA, 20 nt, Homo sapiens
  source 1..20: mol_type = genomic RNA
tgtaccaggtggagttcaag

SEQ ID NO: 11976 - RNA, 20 nt, Homo sapiens
  source 1..20: mol_type = genomic RNA
gtaccaggtggagttcaaga

SEQ ID NO: 11977 - RNA, 20 nt, Homo sapiens
  source 1..20: mol_type = genomic RNA
taccaggtggagttcaagac

SEQ ID NO: 11978 - RNA, 20 nt, Homo sapiens
  source 1..20: mol_type = genomic RNA
accaggtggagttcaagacc

SEQ ID NO: 11979 - RNA, 20 nt, Homo sapiens
  source 1..20: mol_type = genomic RNA
ccaggtggagttcaagacca

SEQ ID NO: 11980 - RNA, 20 nt, Homo sapiens
  source 1..20: mol_type = genomic RNA
caggtggagttcaagaccat

SEQ ID NO: 11981 - RNA, 20 nt, Homo sapiens
  source 1..20: mol_type = genomic RNA
aggtggagttcaagaccatg

SEQ ID NO: 11982 - RNA, 20 nt, Homo sapiens
  source 1..20: mol_type = genomic RNA
ggtggagttcaagaccatga

SEQ ID NO: 11983 - RNA, 20 nt, Homo sapiens
  source 1..20: mol_type = genomic RNA
gtggagttcaagaccatgaa

SEQ ID NO: 11984 - RNA, 20 nt, Homo sapiens
  source 1..20: mol_type = genomic RNA
tggagttcaagaccatgaat

SEQ ID NO: 11985 - RNA, 20 nt, Homo sapiens
  source 1..20: mol_type = genomic RNA
ggagttcaagaccatgaatg

SEQ ID NO: 11986 - RNA, 20 nt, Homo sapiens
  source 1..20: mol_type = genomic RNA
gagttcaagaccatgaatgc

SEQ ID NO: 11987 - RNA, 20 nt, Homo sapiens
  source 1..20: mol_type = genomic RNA
agttcaagaccatgaatgca

SEQ ID NO: 11988 - RNA, 20 nt, Homo sapiens
  source 1..20: mol_type = genomic RNA
gttcaagaccatgaatgcaa

SEQ ID NO: 11989 - RNA, 20 nt, Homo sapiens
  source 1..20: mol_type = genomic RNA
ttcaagaccatgaatgcaaa

SEQ ID NO: 11990 - RNA, 20 nt, Homo sapiens
  source 1..20: mol_type = genomic RNA
tcaagaccatgaatgcaaag

SEQ ID NO: 11991 - RNA, 20 nt, Homo sapiens
  source 1..20: mol_type = genomic RNA
caagaccatgaatgcaaagc

SEQ ID NO: 11992 - RNA, 20 nt, Homo sapiens
  source 1..20: mol_type = genomic RNA
aagaccatgaatgcaaagct

SEQ ID NO: 11993 - RNA, 20 nt, Homo sapiens
  source 1..20: mol_type = genomic RNA
agaccatgaatgcaaagctt

SEQ ID NO: 11994 - RNA, 20 nt, Homo sapiens
  source 1..20: mol_type = genomic RNA
gaccatgaatgcaaagcttc

SEQ ID NO: 11995 - RNA, 20 nt, Homo sapiens
  source 1..20: mol_type = genomic RNA
accatgaatgcaaagcttct

SEQ ID NO: 11996 - RNA, 20 nt, Homo sapiens
  source 1..20: mol_type = genomic RNA
ccatgaatgcaaagcttctg

SEQ ID NO: 11997 - RNA, 20 nt, Homo sapiens
  source 1..20: mol_type = genomic RNA
catgaatgcaaagcttctga

SEQ ID NO: 11998 - RNA, 20 nt, Homo sapiens
  source 1..20: mol_type = genomic RNA
atgaatgcaaagcttctgat

SEQ ID NO: 11999 - RNA, 20 nt, Homo sapiens
  source 1..20: mol_type = genomic RNA
tgaatgcaaagcttctgatg

SEQ ID NO: 12000 - RNA, 20 nt, Homo sapiens
  source 1..20: mol_type = genomic RNA
gaatgcaaagcttctgatgg

SEQ ID NO: 12001 - RNA, 20 nt, Homo sapiens
  source 1..20: mol_type = genomic RNA
aatgcaaagcttctgatgga

SEQ ID NO: 12002 - RNA, 20 nt, Homo sapiens
  source 1..20: mol_type = genomic RNA
atgcaaagcttctgatggat

SEQ ID NO: 12003 - RNA, 20 nt, Homo sapiens
  source 1..20: mol_type = genomic RNA
tgcaaagcttctgatggatc

SEQ ID NO: 12004 - RNA, 20 nt, Homo sapiens
  source 1..20: mol_type = genomic RNA
gcaaagcttctgatggatcc

SEQ ID NO: 12005 - RNA, 20 nt, Homo sapiens
  source 1..20: mol_type = genomic RNA
caaagcttctgatggatcct

SEQ ID NO: 12006 - RNA, 20 nt, Homo sapiens
  source 1..20: mol_type = genomic RNA
aaagcttctgatggatccta

SEQ ID NO: 12007 - RNA, 20 nt, Homo sapiens
  source 1..20: mol_type = genomic RNA
aagcttctgatggatcctaa

SEQ ID NO: 12008 - RNA, 20 nt, Homo sapiens
  source 1..20: mol_type = genomic RNA
agcttctgatggatcctaag

SEQ ID NO: 12009 - RNA, 20 nt, Homo sapiens
  source 1..20: mol_type = genomic RNA
gcttctgatggatcctaaga

SEQ ID NO: 12010 - RNA, 20 nt, Homo sapiens
  source 1..20: mol_type = genomic RNA
cttctgatggatcctaagag

SEQ ID NO: 12011 - RNA, 20 nt, Homo sapiens
  source 1..20: mol_type = genomic RNA
ttctgatggatcctaagagg

SEQ ID NO: 12012 - RNA, 20 nt, Homo sapiens
  source 1..20: mol_type = genomic RNA
tctgatggatcctaagaggc

SEQ ID NO: 12013 - RNA, 20 nt, Homo sapiens
  source 1..20: mol_type = genomic RNA
ctgatggatcctaagaggca

SEQ ID NO: 12014 - RNA, 20 nt, Homo sapiens
  source 1..20: mol_type = genomic RNA
tgatggatcctaagaggcag

SEQ ID NO: 12015 - RNA, 20 nt, Homo sapiens
  source 1..20: mol_type = genomic RNA
gatggatcctaagaggcaga

SEQ ID NO: 12016 - RNA, 20 nt, Homo sapiens
  source 1..20: mol_type = genomic RNA
atggatcctaagaggcagat

SEQ ID NO: 12017 - RNA, 20 nt, Homo sapiens
  source 1..20: mol_type = genomic RNA
tggatcctaagaggcagatc

SEQ ID NO: 12018 - RNA, 20 nt, Homo sapiens
  source 1..20: mol_type = genomic RNA
ggatcctaagaggcagatct

SEQ ID NO: 12019 - RNA, 20 nt, Homo sapiens
  source 1..20: mol_type = genomic RNA
gatcctaagaggcagatctt

SEQ ID NO: 12020 - RNA, 20 nt, Homo sapiens
  source 1..20: mol_type = genomic RNA
atcctaagaggcagatcttt

SEQ ID NO: 12021 - RNA, 20 nt, Homo sapiens
  source 1..20: mol_type = genomic RNA
tcctaagaggcagatctttc

SEQ ID NO: 12022 - RNA, 20 nt, Homo sapiens
  source 1..20: mol_type = genomic RNA
cctaagaggcagatctttct

SEQ ID NO: 12023 - RNA, 20 nt, Homo sapiens
  source 1..20: mol_type = genomic RNA
ctaagaggcagatctttcta

SEQ ID NO: 12024 - RNA, 20 nt, Homo sapiens
  source 1..20: mol_type = genomic RNA
taagaggcagatctttctag

SEQ ID NO: 12025 - RNA, 20 nt, Homo sapiens
  source 1..20: mol_type = genomic RNA
aagaggcagatctttctaga

SEQ ID NO: 12026 - RNA, 20 nt, Homo sapiens
  source 1..20: mol_type = genomic RNA
agaggcagatctttctagat

SEQ ID NO: 12027 - RNA, 20 nt, Homo sapiens
  source 1..20: mol_type = genomic RNA
gaggcagatctttctagatc

SEQ ID NO: 12028 - RNA, 20 nt, Homo sapiens
  source 1..20: mol_type = genomic RNA
aggcagatctttctagatca

SEQ ID NO: 12029 - RNA, 20 nt, Homo sapiens
  source 1..20: mol_type = genomic RNA
ggcagatctttctagatcaa

SEQ ID NO: 12030 - RNA, 20 nt, Homo sapiens
  source 1..20: mol_type = genomic RNA
gcagatctttctagatcaaa

SEQ ID NO: 12031 - RNA, 20 nt, Homo sapiens
  source 1..20: mol_type = genomic RNA
cagatctttctagatcaaaa

SEQ ID NO: 12032 - RNA, 20 nt, Homo sapiens
  source 1..20: mol_type = genomic RNA
agatctttctagatcaaaac

SEQ ID NO: 12033 - RNA, 20 nt, Homo sapiens
  source 1..20: mol_type = genomic RNA
gatctttctagatcaaaaca

SEQ ID NO: 12034 - RNA, 20 nt, Homo sapiens
  source 1..20: mol_type = genomic RNA
atctttctagatcaaaacat

SEQ ID NO: 12035 - RNA, 20 nt, Homo sapiens
  source 1..20: mol_type = genomic RNA
tctttctagatcaaaacatg

SEQ ID NO: 12036 - RNA, 20 nt, Homo sapiens
  source 1..20: mol_type = genomic RNA
ctttctagatcaaaacatgc

SEQ ID NO: 12037 - RNA, 20 nt, Homo sapiens
  source 1..20: mol_type = genomic RNA
tttctagatcaaaacatgct

SEQ ID NO: 12038 - RNA, 20 nt, Homo sapiens
  source 1..20: mol_type = genomic RNA
ttctagatcaaaacatgctg

SEQ ID NO: 12039 - RNA, 20 nt, Homo sapiens
  source 1..20: mol_type = genomic RNA
tctagatcaaaacatgctgg

SEQ ID NO: 12040 - RNA, 20 nt, Homo sapiens
  source 1..20: mol_type = genomic RNA
ctagatcaaaacatgctggc

SEQ ID NO: 12041 - RNA, 20 nt, Homo sapiens
  source 1..20: mol_type = genomic RNA
tagatcaaaacatgctggca

SEQ ID NO: 12042 - RNA, 20 nt, Homo sapiens
  source 1..20: mol_type = genomic RNA
agatcaaaacatgctggcag

SEQ ID NO: 12043 - RNA, 20 nt, Homo sapiens
  source 1..20: mol_type = genomic RNA
gatcaaaacatgctggcagt

SEQ ID NO: 12044 - RNA, 20 nt, Homo sapiens
  source 1..20: mol_type = genomic RNA
atcaaaacatgctggcagtt

SEQ ID NO: 12045 - RNA, 20 nt, Homo sapiens
  source 1..20: mol_type = genomic RNA
tcaaaacatgctggcagtta

SEQ ID NO: 12046 - RNA, 20 nt, Homo sapiens
  source 1..20: mol_type = genomic RNA
caaaacatgctggcagttat

SEQ ID NO: 12047 - RNA, 20 nt, Homo sapiens
  source 1..20: mol_type = genomic RNA
aaaacatgctggcagttatt

SEQ ID NO: 12048 - RNA, 20 nt, Homo sapiens
  source 1..20: mol_type = genomic RNA
aaacatgctggcagttattg

SEQ ID NO: 12049 - RNA, 20 nt, Homo sapiens
  source 1..20: mol_type = genomic RNA
aacatgctggcagttattga

SEQ ID NO: 12050 - RNA, 20 nt, Homo sapiens
  source 1..20: mol_type = genomic RNA
acatgctggcagttattgat

SEQ ID NO: 12051 - RNA, 20 nt, Homo sapiens
  source 1..20: mol_type = genomic RNA
catgctggcagttattgatg

SEQ ID NO: 12052 - RNA, 20 nt, Homo sapiens
  source 1..20: mol_type = genomic RNA
atgctggcagttattgatga

SEQ ID NO: 12053 - RNA, 20 nt, Homo sapiens
  source 1..20: mol_type = genomic RNA
tgctggcagttattgatgag

SEQ ID NO: 12054 - RNA, 20 nt, Homo sapiens
  source 1..20: mol_type = genomic RNA
gctggcagttattgatgagc

SEQ ID NO: 12055 - RNA, 20 nt, Homo sapiens
  source 1..20: mol_type = genomic RNA
ctggcagttattgatgagct

SEQ ID NO: 12056 - RNA, 20 nt, Homo sapiens
  source 1..20: mol_type = genomic RNA
tggcagttattgatgagctg

SEQ ID NO: 12057 - RNA, 20 nt, Homo sapiens
  source 1..20: mol_type = genomic RNA
ggcagttattgatgagctga

SEQ ID NO: 12058 - RNA, 20 nt, Homo sapiens
  source 1..20: mol_type = genomic RNA
gcagttattgatgagctgat

SEQ ID NO: 12059 - RNA, 20 nt, Homo sapiens
  source 1..20: mol_type = genomic RNA
cagttattgatgagctgatg

SEQ ID NO: 12060 - RNA, 20 nt, Homo sapiens
  source 1..20: mol_type = genomic RNA
agttattgatgagctgatgc

SEQ ID NO: 12061 - RNA, 20 nt, Homo sapiens
  source 1..20: mol_type = genomic RNA
gttattgatgagctgatgca

SEQ ID NO: 12062 - RNA, 20 nt, Homo sapiens
  source 1..20: mol_type = genomic RNA
ttattgatgagctgatgcag

SEQ ID NO: 12063 - RNA, 20 nt, Homo sapiens
  source 1..20: mol_type = genomic RNA
tattgatgagctgatgcagg

SEQ ID NO: 12064 - RNA, 20 nt, Homo sapiens
  source 1..20: mol_type = genomic RNA
attgatgagctgatgcaggc

SEQ ID NO: 12065 - RNA, 20 nt, Homo sapiens
  source 1..20: mol_type = genomic RNA
ttgatgagctgatgcaggcc

SEQ ID NO: 12066 - RNA, 20 nt, Homo sapiens
  source 1..20: mol_type = genomic RNA
tgatgagctgatgcaggccc

SEQ ID NO: 12067 - RNA, 20 nt, Homo sapiens
  source 1..20: mol_type = genomic RNA
gatgagctgatgcaggccct

SEQ ID NO: 12068 - RNA, 20 nt, Homo sapiens
  source 1..20: mol_type = genomic RNA
atgagctgatgcaggccctg

SEQ ID NO: 12069 - RNA, 20 nt, Homo sapiens
  source 1..20: mol_type = genomic RNA
tgagctgatgcaggccctga

SEQ ID NO: 12070 - RNA, 20 nt, Homo sapiens
  source 1..20: mol_type = genomic RNA
gagctgatgcaggccctgaa

SEQ ID NO: 12071 - RNA, 20 nt, Homo sapiens
  source 1..20: mol_type = genomic RNA
agctgatgcaggccctgaat

SEQ ID NO: 12072 - RNA, 20 nt, Homo sapiens
  source 1..20: mol_type = genomic RNA
gctgatgcaggccctgaatt

SEQ ID NO: 12073 - RNA, 20 nt, Homo sapiens
  source 1..20: mol_type = genomic RNA
ctgatgcaggccctgaattt

SEQ ID NO: 12074 - RNA, 20 nt, Homo sapiens
  source 1..20: mol_type = genomic RNA
tgatgcaggccctgaatttc

SEQ ID NO: 12075 - RNA, 20 nt, Homo sapiens
  source 1..20: mol_type = genomic RNA
gatgcaggccctgaatttca

SEQ ID NO: 12076 - RNA, 20 nt, Homo sapiens
  source 1..20: mol_type = genomic RNA
atgcaggccctgaatttcaa

SEQ ID NO: 12077 - RNA, 20 nt, Homo sapiens
  source 1..20: mol_type = genomic RNA
tgcaggccctgaatttcaac

SEQ ID NO: 12078 - RNA, 20 nt, Homo sapiens
  source 1..20: mol_type = genomic RNA
gcaggccctgaatttcaaca

SEQ ID NO: 12079 - RNA, 20 nt, Homo sapiens
  source 1..20: mol_type = genomic RNA
caggccctgaatttcaacag

SEQ ID NO: 12080 - RNA, 20 nt, Homo sapiens
  source 1..20: mol_type = genomic RNA
aggccctgaatttcaacagt

SEQ ID NO: 12081 - RNA, 20 nt, Homo sapiens
  source 1..20: mol_type = genomic RNA
ggccctgaatttcaacagtg

SEQ ID NO: 12082 - RNA, 20 nt, Homo sapiens
  source 1..20: mol_type = genomic RNA
gccctgaatttcaacagtga

SEQ ID NO: 12083 - RNA, 20 nt, Homo sapiens
  source 1..20: mol_type = genomic RNA
ccctgaatttcaacagtgag

SEQ ID NO: 12084 - RNA, 20 nt, Homo sapiens
  source 1..20: mol_type = genomic RNA
cctgaatttcaacagtgaga

SEQ ID NO: 12085 - RNA, 20 nt, Homo sapiens
  source 1..20: mol_type = genomic RNA
ctgaatttcaacagtgagac

SEQ ID NO: 12086 - RNA, 20 nt, Homo sapiens
  source 1..20: mol_type = genomic RNA
tgaatttcaacagtgagact

SEQ ID NO: 12087 - RNA, 20 nt, Homo sapiens
  source 1..20: mol_type = genomic RNA
gaatttcaacagtgagactg

SEQ ID NO: 12088 - RNA, 20 nt, Homo sapiens
  source 1..20: mol_type = genomic RNA
aatttcaacagtgagactgt

SEQ ID NO: 12089 - RNA, 20 nt, Homo sapiens
  source 1..20: mol_type = genomic RNA
atttcaacagtgagactgtg

SEQ ID NO: 12090 - RNA, 20 nt, Homo sapiens
  source 1..20: mol_type = genomic RNA
tttcaacagtgagactgtgc

SEQ ID NO: 12091 - RNA, 20 nt, Homo sapiens
  source 1..20: mol_type = genomic RNA
ttcaacagtgagactgtgcc

SEQ ID NO: 12092 - RNA, 20 nt, Homo sapiens
  source 1..20: mol_type = genomic RNA
tcaacagtgagactgtgcca

SEQ ID NO: 12093 - RNA, 20 nt, Homo sapiens
  source 1..20: mol_type = genomic RNA
caacagtgagactgtgccac

SEQ ID NO: 12094 - RNA, 20 nt, Homo sapiens
  source 1..20: mol_type = genomic RNA
aacagtgagactgtgccaca

SEQ ID NO: 12095 - RNA, 20 nt, Homo sapiens
  source 1..20: mol_type = genomic RNA
acagtgagactgtgccacaa

SEQ ID NO: 12096 - RNA, 20 nt, Homo sapiens
  source 1..20: mol_type = genomic RNA
cagtgagactgtgccacaaa

SEQ ID NO: 12097 - RNA, 20 nt, Homo sapiens
  source 1..20: mol_type = genomic RNA
agtgagactgtgccacaaaa

SEQ ID NO: 12098 - RNA, 20 nt, Homo sapiens
  source 1..20: mol_type = genomic RNA
gtgagactgtgccacaaaaa

SEQ ID NO: 12099 - RNA, 20 nt, Homo sapiens
  source 1..20: mol_type = genomic RNA
tgagactgtgccacaaaaat

SEQ ID NO: 12100 - RNA, 20 nt, Homo sapiens
  source 1..20: mol_type = genomic RNA
gagactgtgccacaaaaatc

SEQ ID NO: 12101 - RNA, 20 nt, Homo sapiens
  source 1..20: mol_type = genomic RNA
agactgtgccacaaaaatcc

SEQ ID NO: 12102 - RNA, 20 nt, Homo sapiens
  source 1..20: mol_type = genomic RNA
gactgtgccacaaaaatcct

SEQ ID NO: 12103 - RNA, 20 nt, Homo sapiens
  source 1..20: mol_type = genomic RNA
actgtgccacaaaaatcctc

SEQ ID NO: 12104 - RNA, 20 nt, Homo sapiens
  source 1..20: mol_type = genomic RNA
ctgtgccacaaaaatcctcc

SEQ ID NO: 12105 - RNA, 20 nt, Homo sapiens
  source 1..20: mol_type = genomic RNA
tgtgccacaaaaatcctccc

SEQ ID NO: 12106 - RNA, 20 nt, Homo sapiens
  source 1..20: mol_type = genomic RNA
gtgccacaaaaatcctccct

SEQ ID NO: 12107 - RNA, 20 nt, Homo sapiens
  source 1..20: mol_type = genomic RNA
tgccacaaaaatcctccctt

SEQ ID NO: 12108 - RNA, 20 nt, Homo sapiens
  source 1..20: mol_type = genomic RNA
gccacaaaaatcctcccttg

SEQ ID NO: 12109 - RNA, 20 nt, Homo sapiens
  source 1..20: mol_type = genomic RNA
ccacaaaaatcctcccttga

SEQ ID NO: 12110 - RNA, 20 nt, Homo sapiens
  source 1..20: mol_type = genomic RNA
cacaaaaatcctcccttgaa

SEQ ID NO: 12111 - RNA, 20 nt, Homo sapiens
  source 1..20: mol_type = genomic RNA
acaaaaatcctcccttgaag

SEQ ID NO: 12112 - RNA, 20 nt, Homo sapiens
  source 1..20: mol_type = genomic RNA
caaaaatcctcccttgaaga

SEQ ID NO: 12113 - RNA, 20 nt, Homo sapiens
  source 1..20: mol_type = genomic RNA
aaaaatcctcccttgaagaa

SEQ ID NO: 12114 - RNA, 20 nt, Homo sapiens
  source 1..20: mol_type = genomic RNA
aaaatcctcccttgaagaac

SEQ ID NO: 12115 - RNA, 20 nt, Homo sapiens
  source 1..20: mol_type = genomic RNA
aaatcctcccttgaagaacc

SEQ ID NO: 12116 - RNA, 20 nt, Homo sapiens
  source 1..20: mol_type = genomic RNA
aatcctcccttgaagaaccg

SEQ ID NO: 12117 - RNA, 20 nt, Homo sapiens
  source 1..20: mol_type = genomic RNA
atcctcccttgaagaaccgg

SEQ ID NO: 12118 - RNA, 20 nt, Homo sapiens
  source 1..20: mol_type = genomic RNA
tcctcccttgaagaaccgga

SEQ ID NO: 12119 - RNA, 20 nt, Homo sapiens
  source 1..20: mol_type = genomic RNA
cctcccttgaagaaccggat

SEQ ID NO: 12120 - RNA, 20 nt, Homo sapiens
  source 1..20: mol_type = genomic RNA
ctcccttgaagaaccggatt

SEQ ID NO: 12121 - RNA, 20 nt, Homo sapiens
  source 1..20: mol_type = genomic RNA
tcccttgaagaaccggattt

SEQ ID NO: 12122 - RNA, 20 nt, Homo sapiens
  source 1..20: mol_type = genomic RNA
cccttgaagaaccggatttt

SEQ ID NO: 12123 - RNA, 20 nt, Homo sapiens
  source 1..20: mol_type = genomic RNA
ccttgaagaaccggattttt

SEQ ID NO: 12124 - RNA, 20 nt, Homo sapiens
  source 1..20: mol_type = genomic RNA
cttgaagaaccggattttta

SEQ ID NO: 12125 - RNA, 20 nt, Homo sapiens
  source 1..20: mol_type = genomic RNA
ttgaagaaccggatttttat

SEQ ID NO: 12126 - RNA, 20 nt, Homo sapiens
  source 1..20: mol_type = genomic RNA
tgaagaaccggatttttata

SEQ ID NO: 12127 - RNA, 20 nt, Homo sapiens
  source 1..20: mol_type = genomic RNA
gaagaaccggatttttataa

SEQ ID NO: 12128 - RNA, 20 nt, Homo sapiens
  source 1..20: mol_type = genomic RNA
aagaaccggatttttataaa

SEQ ID NO: 12129 - RNA, 20 nt, Homo sapiens
  source 1..20: mol_type = genomic RNA
agaaccggatttttataaaa

SEQ ID NO: 12130 - RNA, 20 nt, Homo sapiens
  source 1..20: mol_type = genomic RNA
gaaccggatttttataaaac

SEQ ID NO: 12131 - RNA, 20 nt, Homo sapiens
  source 1..20: mol_type = genomic RNA
aaccggatttttataaaact

SEQ ID NO: 12132 - RNA, 20 nt, Homo sapiens
  source 1..20: mol_type = genomic RNA
accggatttttataaaacta

SEQ ID NO: 12133 - RNA, 20 nt, Homo sapiens
  source 1..20: mol_type = genomic RNA
ccggatttttataaaactaa

SEQ ID NO: 12134 - RNA, 20 nt, Homo sapiens
  source 1..20: mol_type = genomic RNA
cggatttttataaaactaaa

SEQ ID NO: 12135 - RNA, 20 nt, Homo sapiens
  source 1..20: mol_type = genomic RNA
ggatttttataaaactaaaa

SEQ ID NO: 12136 - RNA, 20 nt, Homo sapiens
  source 1..20: mol_type = genomic RNA
gatttttataaaactaaaat

SEQ ID NO: 12137 - RNA, 20 nt, Homo sapiens
  source 1..20: mol_type = genomic RNA
atttttataaaactaaaatc

SEQ ID NO: 12138 - RNA, 20 nt, Homo sapiens
  source 1..20: mol_type = genomic RNA
tttttataaaactaaaatca

SEQ ID NO: 12139 - RNA, 20 nt, Homo sapiens
  source 1..20: mol_type = genomic RNA
ttttataaaactaaaatcaa

SEQ ID NO: 12140 - RNA, 20 nt, Homo sapiens
  source 1..20: mol_type = genomic RNA
tttataaaactaaaatcaag

SEQ ID NO: 12141 - RNA, 20 nt, Homo sapiens
  source 1..20: mol_type = genomic RNA
ttataaaactaaaatcaagc

SEQ ID NO: 12142 - RNA, 20 nt, Homo sapiens
  source 1..20: mol_type = genomic RNA
tataaaactaaaatcaagct

SEQ ID NO: 12143 - RNA, 20 nt, Homo sapiens
  source 1..20: mol_type = genomic RNA
ataaaactaaaatcaagctc

SEQ ID NO: 12144 - RNA, 20 nt, Homo sapiens
  source 1..20: mol_type = genomic RNA
taaaactaaaatcaagctct

SEQ ID NO: 12145 - RNA, 20 nt, Homo sapiens
  source 1..20: mol_type = genomic RNA
aaaactaaaatcaagctctg

SEQ ID NO: 12146 - RNA, 20 nt, Homo sapiens
  source 1..20: mol_type = genomic RNA
aaactaaaatcaagctctgc

SEQ ID NO: 12147 - RNA, 20 nt, Homo sapiens
  source 1..20: mol_type = genomic RNA
aactaaaatcaagctctgca

SEQ ID NO: 12148 - RNA, 20 nt, Homo sapiens
  source 1..20: mol_type = genomic RNA
actaaaatcaagctctgcat

SEQ ID NO: 12149 - RNA, 20 nt, Homo sapiens
  source 1..20: mol_type = genomic RNA
ctaaaatcaagctctgcata

SEQ ID NO: 12150 - RNA, 20 nt, Homo sapiens
  source 1..20: mol_type = genomic RNA
taaaatcaagctctgcatac

SEQ ID NO: 12151 - RNA, 20 nt, Homo sapiens
  source 1..20: mol_type = genomic RNA
aaaatcaagctctgcatact

SEQ ID NO: 12152 - RNA, 20 nt, Homo sapiens
  source 1..20: mol_type = genomic RNA
aaatcaagctctgcatactt

SEQ ID NO: 12153 - RNA, 20 nt, Homo sapiens
  source 1..20: mol_type = genomic RNA
aatcaagctctgcatacttc

SEQ ID NO: 12154 - RNA, 20 nt, Homo sapiens
  source 1..20: mol_type = genomic RNA
atcaagctctgcatacttct

SEQ ID NO: 12155 - RNA, 20 nt, Homo sapiens
  source 1..20: mol_type = genomic RNA
tcaagctctgcatacttctt

SEQ ID NO: 12156 - RNA, 20 nt, Homo sapiens
  source 1..20: mol_type = genomic RNA
caagctctgcatacttcttc

SEQ ID NO: 12157 - RNA, 20 nt, Homo sapiens
  source 1..20: mol_type = genomic RNA
aagctctgcatacttcttca

SEQ ID NO: 12158 - RNA, 20 nt, Homo sapiens
  source 1..20: mol_type = genomic RNA
agctctgcatacttcttcat

SEQ ID NO: 12159 - RNA, 20 nt, Homo sapiens
  source 1..20: mol_type = genomic RNA
gctctgcatacttcttcatg

SEQ ID NO: 12160 - RNA, 20 nt, Homo sapiens
  source 1..20: mol_type = genomic RNA
ctctgcatacttcttcatgc

SEQ ID NO: 12161 - RNA, 20 nt, Homo sapiens
  source 1..20: mol_type = genomic RNA
tctgcatacttcttcatgct

SEQ ID NO: 12162 - RNA, 20 nt, Homo sapiens
  source 1..20: mol_type = genomic RNA
ctgcatacttcttcatgctt

SEQ ID NO: 12163 - RNA, 20 nt, Homo sapiens
  source 1..20: mol_type = genomic RNA
tgcatacttcttcatgcttt

SEQ ID NO: 12164 - RNA, 20 nt, Homo sapiens
  source 1..20: mol_type = genomic RNA
gcatacttcttcatgctttc

SEQ ID NO: 12165 - RNA, 20 nt, Homo sapiens
  source 1..20: mol_type = genomic RNA
catacttcttcatgctttca

SEQ ID NO: 12166 - RNA, 20 nt, Homo sapiens
  source 1..20: mol_type = genomic RNA
atacttcttcatgctttcag

SEQ ID NO: 12167 - RNA, 20 nt, Homo sapiens
  source 1..20: mol_type = genomic RNA
tacttcttcatgctttcaga

SEQ ID NO: 12168 - RNA, 20 nt, Homo sapiens
  source 1..20: mol_type = genomic RNA
acttcttcatgctttcagaa

SEQ ID NO: 12169 - RNA, 20 nt, Homo sapiens
  source 1..20: mol_type = genomic RNA
cttcttcatgctttcagaat

SEQ ID NO: 12170 - RNA, 20 nt, Homo sapiens
  source 1..20: mol_type = genomic RNA
ttcttcatgctttcagaatt

SEQ ID NO: 12171 - RNA, 20 nt, Homo sapiens
  source 1..20: mol_type = genomic RNA
tcttcatgctttcagaattc

SEQ ID NO: 12172 - RNA, 20 nt, Homo sapiens
  source 1..20: mol_type = genomic RNA
cttcatgctttcagaattcg

SEQ ID NO: 12173 - RNA, 20 nt, Homo sapiens
  source 1..20: mol_type = genomic RNA
ttcatgctttcagaattcgg

SEQ ID NO: 12174 - RNA, 20 nt, Homo sapiens
  source 1..20: mol_type = genomic RNA
tcatgctttcagaattcggg

SEQ ID NO: 12175 - RNA, 20 nt, Homo sapiens
  source 1..20: mol_type = genomic RNA
catgctttcagaattcgggc

SEQ ID NO: 12176 - RNA, 20 nt, Homo sapiens
  source 1..20: mol_type = genomic RNA
atgctttcagaattcgggca

SEQ ID NO: 12177 - RNA, 20 nt, Homo sapiens
  source 1..20: mol_type = genomic RNA
tgctttcagaattcgggcag

SEQ ID NO: 12178 - RNA, 20 nt, Homo sapiens
  source 1..20: mol_type = genomic RNA
gctttcagaattcgggcagt

SEQ ID NO: 12179 - RNA, 20 nt, Homo sapiens
  source 1..20: mol_type = genomic RNA
ctttcagaattcgggcagtg

SEQ ID NO: 12180 - RNA, 20 nt, Homo sapiens
  source 1..20: mol_type = genomic RNA
tttcagaattcgggcagtga

SEQ ID NO: 12181 - RNA, 20 nt, Homo sapiens
  source 1..20: mol_type = genomic RNA
ttcagaattcgggcagtgac

SEQ ID NO: 12182 - RNA, 20 nt, Homo sapiens
  source 1..20: mol_type = genomic RNA
tcagaattcgggcagtgact

SEQ ID NO: 12183 - RNA, 20 nt, Homo sapiens
  source 1..20: mol_type = genomic RNA
cagaattcgggcagtgacta

SEQ ID NO: 12184 - RNA, 20 nt, Homo sapiens
  source 1..20: mol_type = genomic RNA
agaattcgggcagtgactat

SEQ ID NO: 12185 - RNA, 20 nt, Homo sapiens
  source 1..20: mol_type = genomic RNA
gaattcgggcagtgactatt

SEQ ID NO: 12186 - RNA, 20 nt, Homo sapiens
  source 1..20: mol_type = genomic RNA
aattcgggcagtgactattg

SEQ ID NO: 12187 - RNA, 20 nt, Homo sapiens
  source 1..20: mol_type = genomic RNA
attcgggcagtgactattga

SEQ ID NO: 12188 - RNA, 20 nt, Homo sapiens
  source 1..20: mol_type = genomic RNA
ttcgggcagtgactattgat

SEQ ID NO: 12189 - RNA, 20 nt, Homo sapiens
  source 1..20: mol_type = genomic RNA
tcgggcagtgactattgata

SEQ ID NO: 12190 - RNA, 20 nt, Homo sapiens
  source 1..20: mol_type = genomic RNA
cgggcagtgactattgatag

SEQ ID NO: 12191 - RNA, 20 nt, Homo sapiens
  source 1..20: mol_type = genomic RNA
gggcagtgactattgataga

SEQ ID NO: 12192 - RNA, 20 nt, Homo sapiens
  source 1..20: mol_type = genomic RNA
ggcagtgactattgatagag

SEQ ID NO: 12193 - RNA, 20 nt, Homo sapiens
  source 1..20: mol_type = genomic RNA
gcagtgactattgatagagt

SEQ ID NO: 12194 - RNA, 20 nt, Homo sapiens
  source 1..20: mol_type = genomic RNA
cagtgactattgatagagtg

SEQ ID NO: 12195 - RNA, 20 nt, Homo sapiens
  source 1..20: mol_type = genomic RNA
agtgactattgatagagtga

SEQ ID NO: 12196 - RNA, 20 nt, Homo sapiens
  source 1..20: mol_type = genomic RNA
gtgactattgatagagtgat

SEQ ID NO: 12197 - RNA, 20 nt, Homo sapiens
  source 1..20: mol_type = genomic RNA
tgactattgatagagtgatg

SEQ ID NO: 12198 - RNA, 20 nt, Homo sapiens
  source 1..20: mol_type = genomic RNA
gactattgatagagtgatga

SEQ ID NO: 12199 - RNA, 20 nt, Homo sapiens
  source 1..20: mol_type = genomic RNA
actattgatagagtgatgag

SEQ ID NO: 12200 - RNA, 20 nt, Homo sapiens
  source 1..20: mol_type = genomic RNA
ctattgatagagtgatgagc

SEQ ID NO: 12201 - RNA, 20 nt, Homo sapiens
  source 1..20: mol_type = genomic RNA
tattgatagagtgatgagct

SEQ ID NO: 12202 - RNA, 20 nt, Homo sapiens
  source 1..20: mol_type = genomic RNA
attgatagagtgatgagcta

SEQ ID NO: 12203 - RNA, 20 nt, Homo sapiens
  source 1..20: mol_type = genomic RNA
ttgatagagtgatgagctat

SEQ ID NO: 12204 - RNA, 20 nt, Homo sapiens
  source 1..20: mol_type = genomic RNA
tgatagagtgatgagctatc

SEQ ID NO: 12205 - RNA, 20 nt, Homo sapiens
  source 1..20: mol_type = genomic RNA
gatagagtgatgagctatct

SEQ ID NO: 12206 - RNA, 20 nt, Homo sapiens
  source 1..20: mol_type = genomic RNA
atagagtgatgagctatctg

SEQ ID NO: 12207 - RNA, 20 nt, Homo sapiens
  source 1..20: mol_type = genomic RNA
tagagtgatgagctatctga

SEQ ID NO: 12208 - RNA, 20 nt, Homo sapiens
  source 1..20: mol_type = genomic RNA
agagtgatgagctatctgaa

SEQ ID NO: 12209 - RNA, 20 nt, Homo sapiens
  source 1..20: mol_type = genomic RNA
gagtgatgagctatctgaat

SEQ ID NO: 12210 - RNA, 20 nt, Homo sapiens
  source 1..20: mol_type = genomic RNA
agtgatgagctatctgaatg

SEQ ID NO: 12211 - RNA, 20 nt, Homo sapiens
  source 1..20: mol_type = genomic RNA
gtgatgagctatctgaatgc

SEQ ID NO: 12212 - RNA, 20 nt, Homo sapiens
  source 1..20: mol_type = genomic RNA
tgatgagctatctgaatgct

SEQ ID NO: 12213 - RNA, 20 nt, Homo sapiens
  source 1..20: mol_type = genomic RNA
gatgagctatctgaatgctt

SEQ ID NO: 12214 - RNA, 20 nt, Homo sapiens
  source 1..20: mol_type = genomic RNA
atgagctatctgaatgcttc

SEQ ID NO: 12215 - RNA, 20 nt, Homo sapiens
  source 1..20: mol_type = genomic RNA
tgagctatctgaatgcttcc

SEQ ID NO: 12216 - RNA, 20 nt, Homo sapiens
  source 1..20: mol_type = genomic RNA
gagctatctgaatgcttcct

SEQ ID NO: 12217 - RNA, 20 nt, Homo sapiens
  source 1..20: mol_type = genomic RNA
agctatctgaatgcttccta

SEQ ID NO: 12218 - RNA, 20 nt, Homo sapiens
  source 1..20: mol_type = genomic RNA
gctatctgaatgcttcctaa

SEQ ID NO: 12219 - RNA, 20 nt, Homo sapiens
  source 1..20: mol_type = genomic RNA
ctatctgaatgcttcctaaa

SEQ ID NO: 12220 - RNA, 20 nt, Homo sapiens
  source 1..20: mol_type = genomic RNA
tatctgaatgcttcctaaaa

SEQ ID NO: 12221 - RNA, 20 nt, Homo sapiens
  source 1..20: mol_type = genomic RNA
atctgaatgcttcctaaaaa

SEQ ID NO: 12222 - RNA, 20 nt, Homo sapiens
  source 1..20: mol_type = genomic RNA
tctgaatgcttcctaaaaag

SEQ ID NO: 12223 - RNA, 20 nt, Homo sapiens
  source 1..20: mol_type = genomic RNA
ctgaatgcttcctaaaaagc

SEQ ID NO: 12224 - RNA, 20 nt, Homo sapiens
  source 1..20: mol_type = genomic RNA
tgaatgcttcctaaaaagcg

SEQ ID NO: 12225 - RNA, 20 nt, Homo sapiens
  source 1..20: mol_type = genomic RNA
gaatgcttcctaaaaagcga

SEQ ID NO: 12226 - RNA, 20 nt, Homo sapiens
  source 1..20: mol_type = genomic RNA
aatgcttcctaaaaagcgag

SEQ ID NO: 12227 - RNA, 20 nt, Homo sapiens
  source 1..20: mol_type = genomic RNA
atgcttcctaaaaagcgagg

SEQ ID NO: 12228 - RNA, 20 nt, Homo sapiens
  source 1..20: mol_type = genomic RNA
tgcttcctaaaaagcgaggt

SEQ ID NO: 12229 - RNA, 20 nt, Homo sapiens
  source 1..20: mol_type = genomic RNA
gcttcctaaaaagcgaggtc

SEQ ID NO: 12230 - RNA, 20 nt, Homo sapiens
  source 1..20: mol_type = genomic RNA
cttcctaaaaagcgaggtcc

SEQ ID NO: 12231 - RNA, 20 nt, Homo sapiens
  source 1..20: mol_type = genomic RNA
ttcctaaaaagcgaggtccc

SEQ ID NO: 12232 - RNA, 20 nt, Homo sapiens
  source 1..20: mol_type = genomic RNA
tcctaaaaagcgaggtccct

SEQ ID NO: 12233 - RNA, 20 nt, Homo sapiens
  source 1..20: mol_type = genomic RNA
cctaaaaagcgaggtccctc

SEQ ID NO: 12234 - RNA, 20 nt, Homo sapiens
  source 1..20: mol_type = genomic RNA
ctaaaaagcgaggtccctcc

SEQ ID NO: 12235 - RNA, 20 nt, Homo sapiens
  source 1..20: mol_type = genomic RNA
taaaaagcgaggtccctcca

SEQ ID NO: 12236 - RNA, 20 nt, Homo sapiens
  source 1..20: mol_type = genomic RNA
aaaaagcgaggtccctccaa

SEQ ID NO: 12237 - RNA, 20 nt, Homo sapiens
  source 1..20: mol_type = genomic RNA
aaaagcgaggtccctccaaa

SEQ ID NO: 12238 - RNA, 20 nt, Homo sapiens
  source 1..20: mol_type = genomic RNA
aaagcgaggtccctccaaac

SEQ ID NO: 12239 - RNA, 20 nt, Homo sapiens
  source 1..20: mol_type = genomic RNA
aagcgaggtccctccaaacc

SEQ ID NO: 12240 - RNA, 20 nt, Homo sapiens
  source 1..20: mol_type = genomic RNA
agcgaggtccctccaaaccg

SEQ ID NO: 12241 - RNA, 20 nt, Homo sapiens
  source 1..20: mol_type = genomic RNA
gcgaggtccctccaaaccgt

SEQ ID NO: 12242 - RNA, 20 nt, Homo sapiens
  source 1..20: mol_type = genomic RNA
cgaggtccctccaaaccgtt

SEQ ID NO: 12243 - RNA, 20 nt, Homo sapiens
  source 1..20: mol_type = genomic RNA
gaggtccctccaaaccgttg

SEQ ID NO: 12244 - RNA, 20 nt, Homo sapiens
  source 1..20: mol_type = genomic RNA
aggtccctccaaaccgttgt

SEQ ID NO: 12245 - RNA, 20 nt, Homo sapiens
  source 1..20: mol_type = genomic RNA
ggtccctccaaaccgttgtc

SEQ ID NO: 12246 - RNA, 20 nt, Homo sapiens
  source 1..20: mol_type = genomic RNA
gtccctccaaaccgttgtca

SEQ ID NO: 12247 - RNA, 20 nt, Homo sapiens
  source 1..20: mol_type = genomic RNA
tccctccaaaccgttgtcat

SEQ ID NO: 12248 - RNA, 20 nt, Homo sapiens
  source 1..20: mol_type = genomic RNA
ccctccaaaccgttgtcatt

SEQ ID NO: 12249 - RNA, 20 nt, Homo sapiens
  source 1..20: mol_type = genomic RNA
cctccaaaccgttgtcattt

SEQ ID NO: 12250 - RNA, 20 nt, Homo sapiens
  source 1..20: mol_type = genomic RNA
ctccaaaccgttgtcatttt

SEQ ID NO: 12251 - RNA, 20 nt, Homo sapiens
  source 1..20: mol_type = genomic RNA
tccaaaccgttgtcattttt

SEQ ID NO: 12252 - RNA, 20 nt, Homo sapiens
  source 1..20: mol_type = genomic RNA
ccaaaccgttgtcattttta

SEQ ID NO: 12253 - RNA, 20 nt, Homo sapiens
  source 1..20: mol_type = genomic RNA
caaaccgttgtcatttttat

SEQ ID NO: 12254 - RNA, 20 nt, Homo sapiens
  source 1..20: mol_type = genomic RNA
aaaccgttgtcatttttata

SEQ ID NO: 12255 - RNA, 20 nt, Homo sapiens
  source 1..20: mol_type = genomic RNA
aaccgttgtcatttttataa

SEQ ID NO: 12256 - RNA, 20 nt, Homo sapiens
  source 1..20: mol_type = genomic RNA
accgttgtcatttttataaa

SEQ ID NO: 12257 - RNA, 20 nt, Homo sapiens
  source 1..20: mol_type = genomic RNA
ccgttgtcatttttataaaa

SEQ ID NO: 12258 - RNA, 20 nt, Homo sapiens
  source 1..20: mol_type = genomic RNA
cgttgtcatttttataaaac

SEQ ID NO: 12259 - RNA, 20 nt, Homo sapiens
  source 1..20: mol_type = genomic RNA
gttgtcatttttataaaact

SEQ ID NO: 12260 - RNA, 20 nt, Homo sapiens
  source 1..20: mol_type = genomic RNA
ttgtcatttttataaaactt

SEQ ID NO: 12261 - RNA, 20 nt, Homo sapiens
  source 1..20: mol_type = genomic RNA
tgtcatttttataaaacttt

SEQ ID NO: 12262 - RNA, 20 nt, Homo sapiens
  source 1..20: mol_type = genomic RNA
gtcatttttataaaactttg

SEQ ID NO: 12263 - RNA, 20 nt, Homo sapiens
  source 1..20: mol_type = genomic RNA
tcatttttataaaactttga

SEQ ID NO: 12264 - RNA, 20 nt, Homo sapiens
  source 1..20: mol_type = genomic RNA
catttttataaaactttgaa

SEQ ID NO: 12265 - RNA, 20 nt, Homo sapiens
  source 1..20: mol_type = genomic RNA
atttttataaaactttgaaa

SEQ ID NO: 12266 - RNA, 20 nt, Homo sapiens
  source 1..20: mol_type = genomic RNA
tttttataaaactttgaaat

SEQ ID NO: 12267 - RNA, 20 nt, Homo sapiens
  source 1..20: mol_type = genomic RNA
ttttataaaactttgaaatg

SEQ ID NO: 12268 - RNA, 20 nt, Homo sapiens
  source 1..20: mol_type = genomic RNA
tttataaaactttgaaatga

SEQ ID NO: 12269 - RNA, 20 nt, Homo sapiens
  source 1..20: mol_type = genomic RNA
ttataaaactttgaaatgag

SEQ ID NO: 12270 - RNA, 20 nt, Homo sapiens
  source 1..20: mol_type = genomic RNA
tataaaactttgaaatgagg

SEQ ID NO: 12271 - RNA, 20 nt, Homo sapiens
  source 1..20: mol_type = genomic RNA
ataaaactttgaaatgagga

SEQ ID NO: 12272 - RNA, 20 nt, Homo sapiens
  source 1..20: mol_type = genomic RNA
taaaactttgaaatgaggaa

SEQ ID NO: 12273 - RNA, 20 nt, Homo sapiens
  source 1..20: mol_type = genomic RNA
aaaactttgaaatgaggaaa

SEQ ID NO: 12274 - RNA, 20 nt, Homo sapiens
  source 1..20: mol_type = genomic RNA
aaactttgaaatgaggaaac

SEQ ID NO: 12275 - RNA, 20 nt, Homo sapiens
  source 1..20: mol_type = genomic RNA
aactttgaaatgaggaaact

SEQ ID NO: 12276 - RNA, 20 nt, Homo sapiens
  source 1..20: mol_type = genomic RNA
actttgaaatgaggaaactt

SEQ ID NO: 12277 - RNA, 20 nt, Homo sapiens
  source 1..20: mol_type = genomic RNA
ctttgaaatgaggaaacttt

SEQ ID NO: 12278 - RNA, 20 nt, Homo sapiens
  source 1..20: mol_type = genomic RNA
tttgaaatgaggaaactttg

SEQ ID NO: 12279 - RNA, 20 nt, Homo sapiens
  source 1..20: mol_type = genomic RNA
ttgaaatgaggaaactttga

SEQ ID NO: 12280 - RNA, 20 nt, Homo sapiens
  source 1..20: mol_type = genomic RNA
tgaaatgaggaaactttgat

SEQ ID NO: 12281 - RNA, 20 nt, Homo sapiens
  source 1..20: mol_type = genomic RNA
gaaatgaggaaactttgata

SEQ ID NO: 12282 - RNA, 20 nt, Homo sapiens
  source 1..20: mol_type = genomic RNA
aaatgaggaaactttgatag

SEQ ID NO: 12283 - RNA, 20 nt, Homo sapiens
  source 1..20: mol_type = genomic RNA
aatgaggaaactttgatagg

SEQ ID NO: 12284 - RNA, 20 nt, Homo sapiens
  source 1..20: mol_type = genomic RNA
atgaggaaactttgatagga

SEQ ID NO: 12285 - RNA, 20 nt, Homo sapiens
  source 1..20: mol_type = genomic RNA
tgaggaaactttgataggat

SEQ ID NO: 12286 - RNA, 20 nt, Homo sapiens
  source 1..20: mol_type = genomic RNA
gaggaaactttgataggatg

SEQ ID NO: 12287 - RNA, 20 nt, Homo sapiens
  source 1..20: mol_type = genomic RNA
aggaaactttgataggatgt

SEQ ID NO: 12288 - RNA, 20 nt, Homo sapiens
  source 1..20: mol_type = genomic RNA
ggaaactttgataggatgtg

SEQ ID NO: 12289 - RNA, 20 nt, Homo sapiens
  source 1..20: mol_type = genomic RNA
gaaactttgataggatgtgg

SEQ ID NO: 12290 - RNA, 20 nt, Homo sapiens
  source 1..20: mol_type = genomic RNA
aaactttgataggatgtgga

SEQ ID NO: 12291 - RNA, 20 nt, Homo sapiens
  source 1..20: mol_type = genomic RNA
aactttgataggatgtggat

SEQ ID NO: 12292 - RNA, 20 nt, Homo sapiens
  source 1..20: mol_type = genomic RNA
actttgataggatgtggatt

SEQ ID NO: 12293 - RNA, 20 nt, Homo sapiens
  source 1..20: mol_type = genomic RNA
ctttgataggatgtggatta

SEQ ID NO: 12294 - RNA, 20 nt, Homo sapiens
  source 1..20: mol_type = genomic RNA
tttgataggatgtggattaa

SEQ ID NO: 12295 - RNA, 20 nt, Homo sapiens
  source 1..20: mol_type = genomic RNA
ttgataggatgtggattaag

SEQ ID NO: 12296 - RNA, 20 nt, Homo sapiens
  source 1..20: mol_type = genomic RNA
tgataggatgtggattaaga

SEQ ID NO: 12297 - RNA, 20 nt, Homo sapiens
  source 1..20: mol_type = genomic RNA
gataggatgtggattaagaa

SEQ ID NO: 12298 - RNA, 20 nt, Homo sapiens
  source 1..20: mol_type = genomic RNA
ataggatgtggattaagaac

SEQ ID NO: 12299 - RNA, 20 nt, Homo sapiens
  source 1..20: mol_type = genomic RNA
taggatgtggattaagaact

SEQ ID NO: 12300 - RNA, 20 nt, Homo sapiens
  source 1..20: mol_type = genomic RNA
aggatgtggattaagaacta

SEQ ID NO: 12301 - RNA, 20 nt, Homo sapiens
  source 1..20: mol_type = genomic RNA
ggatgtggattaagaactag

SEQ ID NO: 12302 - RNA, 20 nt, Homo sapiens
  source 1..20: mol_type = genomic RNA
gatgtggattaagaactagg

SEQ ID NO: 12303 - RNA, 20 nt, Homo sapiens
  source 1..20: mol_type = genomic RNA
atgtggattaagaactaggg

SEQ ID NO: 12304 - RNA, 20 nt, Homo sapiens
  source 1..20: mol_type = genomic RNA
tgtggattaagaactaggga

SEQ ID NO: 12305 - RNA, 20 nt, Homo sapiens
  source 1..20: mol_type = genomic RNA
gtggattaagaactagggag

SEQ ID NO: 12306 - RNA, 20 nt, Homo sapiens
  source 1..20: mol_type = genomic RNA
tggattaagaactagggagg

SEQ ID NO: 12307 - RNA, 20 nt, Homo sapiens
  source 1..20: mol_type = genomic RNA
ggattaagaactagggaggg

SEQ ID NO: 12308 - RNA, 20 nt, Homo sapiens
  source 1..20: mol_type = genomic RNA
gattaagaactagggagggg

SEQ ID NO: 12309 - RNA, 20 nt, Homo sapiens
  source 1..20: mol_type = genomic RNA
attaagaactagggaggggg

SEQ ID NO: 12310 - RNA, 20 nt, Homo sapiens
  source 1..20: mol_type = genomic RNA
ttaagaactagggaggggga

SEQ ID NO: 12311 - RNA, 20 nt, Homo sapiens
  source 1..20: mol_type = genomic RNA
taagaactagggagggggaa

SEQ ID NO: 12312 - RNA, 20 nt, Homo sapiens
  source 1..20: mol_type = genomic RNA
aagaactagggagggggaaa

SEQ ID NO: 12313 - RNA, 20 nt, Homo sapiens
  source 1..20: mol_type = genomic RNA
agaactagggagggggaaag

SEQ ID NO: 12314 - RNA, 20 nt, Homo sapiens
  source 1..20: mol_type = genomic RNA
gaactagggagggggaaaga

SEQ ID NO: 12315 - RNA, 20 nt, Homo sapiens
  source 1..20: mol_type = genomic RNA
aactagggagggggaaagaa

SEQ ID NO: 12316 - RNA, 20 nt, Homo sapiens
  source 1..20: mol_type = genomic RNA
actagggagggggaaagaag

SEQ ID NO: 12317 - RNA, 20 nt, Homo sapiens
  source 1..20: mol_type = genomic RNA
ctagggagggggaaagaagg

SEQ ID NO: 12318 - RNA, 20 nt, Homo sapiens
  source 1..20: mol_type = genomic RNA
tagggagggggaaagaagga

SEQ ID NO: 12319 - RNA, 20 nt, Homo sapiens
  source 1..20: mol_type = genomic RNA
agggagggggaaagaaggat

SEQ ID NO: 12320 - RNA, 20 nt, Homo sapiens
  source 1..20: mol_type = genomic RNA
gggagggggaaagaaggatg

SEQ ID NO: 12321 - RNA, 20 nt, Homo sapiens
  source 1..20: mol_type = genomic RNA
ggagggggaaagaaggatgg

SEQ ID NO: 12322 - RNA, 20 nt, Homo sapiens
  source 1..20: mol_type = genomic RNA
gagggggaaagaaggatggg

SEQ ID NO: 12323 - RNA, 20 nt, Homo sapiens
  source 1..20: mol_type = genomic RNA
agggggaaagaaggatggga

SEQ ID NO: 12324 - RNA, 20 nt, Homo sapiens
  source 1..20: mol_type = genomic RNA
gggggaaagaaggatgggac

SEQ ID NO: 12325 - RNA, 20 nt, Homo sapiens
  source 1..20: mol_type = genomic RNA
ggggaaagaaggatgggact

SEQ ID NO: 12326 - RNA, 20 nt, Homo sapiens
  source 1..20: mol_type = genomic RNA
gggaaagaaggatgggacta

SEQ ID NO: 12327 - RNA, 20 nt, Homo sapiens
  source 1..20: mol_type = genomic RNA
ggaaagaaggatgggactat

SEQ ID NO: 12328 - RNA, 20 nt, Homo sapiens
  source 1..20: mol_type = genomic RNA
gaaagaaggatgggactatt

SEQ ID NO: 12329 - RNA, 20 nt, Homo sapiens
  source 1..20: mol_type = genomic RNA
aaagaaggatgggactatta

SEQ ID NO: 12330 - RNA, 20 nt, Homo sapiens
  source 1..20: mol_type = genomic RNA
aagaaggatgggactattac

SEQ ID NO: 12331 - RNA, 20 nt, Homo sapiens
  source 1..20: mol_type = genomic RNA
agaaggatgggactattaca

SEQ ID NO: 12332 - RNA, 20 nt, Homo sapiens
  source 1..20: mol_type = genomic RNA
gaaggatgggactattacat

SEQ ID NO: 12333 - RNA, 20 nt, Homo sapiens
  source 1..20: mol_type = genomic RNA
aaggatgggactattacatc

SEQ ID NO: 12334 - RNA, 20 nt, Homo sapiens
  source 1..20: mol_type = genomic RNA
aggatgggactattacatcc

SEQ ID NO: 12335 - RNA, 20 nt, Homo sapiens
  source 1..20: mol_type = genomic RNA
ggatgggactattacatcca

SEQ ID NO: 12336 - RNA, 20 nt, Homo sapiens
  source 1..20: mol_type = genomic RNA
gatgggactattacatccac

SEQ ID NO: 12337 - RNA, 20 nt, Homo sapiens
  source 1..20: mol_type = genomic RNA
atgggactattacatccaca

SEQ ID NO: 12338 - RNA, 20 nt, Homo sapiens
  source 1..20: mol_type = genomic RNA
tgggactattacatccacat

SEQ ID NO: 12339 - RNA, 20 nt, Homo sapiens
  source 1..20: mol_type = genomic RNA
gggactattacatccacatg

SEQ ID NO: 12340 - RNA, 20 nt, Homo sapiens
  source 1..20: mol_type = genomic RNA
ggactattacatccacatga

SEQ ID NO: 12341 - RNA, 20 nt, Homo sapiens
  source 1..20: mol_type = genomic RNA
gactattacatccacatgat

SEQ ID NO: 12342 - RNA, 20 nt, Homo sapiens
  source 1..20: mol_type = genomic RNA
actattacatccacatgata

SEQ ID NO: 12343 - RNA, 20 nt, Homo sapiens
  source 1..20: mol_type = genomic RNA
ctattacatccacatgatac

SEQ ID NO: 12344 - RNA, 20 nt, Homo sapiens
  source 1..20: mol_type = genomic RNA
tattacatccacatgatacc

SEQ ID NO: 12345 - RNA, 20 nt, Homo sapiens
  source 1..20: mol_type = genomic RNA
attacatccacatgatacct

SEQ ID NO: 12346 - RNA, 20 nt, Homo sapiens
  source 1..20: mol_type = genomic RNA
ttacatccacatgatacctc

SEQ ID NO: 12347 - RNA, 20 nt, Homo sapiens
  source 1..20: mol_type = genomic RNA
tacatccacatgatacctct

SEQ ID NO: 12348 - RNA, 20 nt, Homo sapiens
  source 1..20: mol_type = genomic RNA
acatccacatgatacctctg

SEQ ID NO: 12349 - RNA, 20 nt, Homo sapiens
  source 1..20: mol_type = genomic RNA
catccacatgatacctctga

SEQ ID NO: 12350 - RNA, 20 nt, Homo sapiens
  source 1..20: mol_type = genomic RNA
atccacatgatacctctgat

SEQ ID NO: 12351 - RNA, 20 nt, Homo sapiens
  source 1..20: mol_type = genomic RNA
tccacatgatacctctgatc

SEQ ID NO: 12352 - RNA, 20 nt, Homo sapiens
  source 1..20: mol_type = genomic RNA
ccacatgatacctctgatca

SEQ ID NO: 12353 - RNA, 20 nt, Homo sapiens
  source 1..20: mol_type = genomic RNA
cacatgatacctctgatcaa

SEQ ID NO: 12354 - RNA, 20 nt, Homo sapiens
  source 1..20: mol_type = genomic RNA
acatgatacctctgatcaag

SEQ ID NO: 12355 - RNA, 20 nt, Homo sapiens
  source 1..20: mol_type = genomic RNA
catgatacctctgatcaagt

SEQ ID NO: 12356 - RNA, 20 nt, Homo sapiens
  source 1..20: mol_type = genomic RNA
atgatacctctgatcaagta

SEQ ID NO: 12357 - RNA, 20 nt, Homo sapiens
  source 1..20: mol_type = genomic RNA
tgatacctctgatcaagtat

SEQ ID NO: 12358 - RNA, 20 nt, Homo sapiens
  source 1..20: mol_type = genomic RNA
gatacctctgatcaagtatt

SEQ ID NO: 12359 - RNA, 20 nt, Homo sapiens
  source 1..20: mol_type = genomic RNA
atacctctgatcaagtattt

SEQ ID NO: 12360 - RNA, 20 nt, Homo sapiens
  source 1..20: mol_type = genomic RNA
tacctctgatcaagtatttt

SEQ ID NO: 12361 - RNA, 20 nt, Homo sapiens
  source 1..20: mol_type = genomic RNA
acctctgatcaagtattttt

SEQ ID NO: 12362 - RNA, 20 nt, Homo sapiens
  source 1..20: mol_type = genomic RNA
cctctgatcaagtatttttg

SEQ ID NO: 12363 - RNA, 20 nt, Homo sapiens
  source 1..20: mol_type = genomic RNA
ctctgatcaagtatttttga

SEQ ID NO: 12364 - RNA, 20 nt, Homo sapiens
  source 1..20: mol_type = genomic RNA
tctgatcaagtatttttgac

SEQ ID NO: 12365 - RNA, 20 nt, Homo sapiens
  source 1..20: mol_type = genomic RNA
ctgatcaagtatttttgaca

SEQ ID NO: 12366 - RNA, 20 nt, Homo sapiens
  source 1..20: mol_type = genomic RNA
tgatcaagtatttttgacat

SEQ ID NO: 12367 - RNA, 20 nt, Homo sapiens
  source 1..20: mol_type = genomic RNA
gatcaagtatttttgacatt

SEQ ID NO: 12368 - RNA, 20 nt, Homo sapiens
  source 1..20: mol_type = genomic RNA
atcaagtatttttgacattt

SEQ ID NO: 12369 - RNA, 20 nt, Homo sapiens
  source 1..20: mol_type = genomic RNA
tcaagtatttttgacattta

SEQ ID NO: 12370 - RNA, 20 nt, Homo sapiens
  source 1..20: mol_type = genomic RNA
caagtatttttgacatttac

SEQ ID NO: 12371 - RNA, 20 nt, Homo sapiens
  source 1..20: mol_type = genomic RNA
aagtatttttgacatttact

SEQ ID NO: 12372 - RNA, 20 nt, Homo sapiens
  source 1..20: mol_type = genomic RNA
agtatttttgacatttactg

SEQ ID NO: 12373 - RNA, 20 nt, Homo sapiens
  source 1..20: mol_type = genomic RNA
gtatttttgacatttactgt

SEQ ID NO: 12374 - RNA, 20 nt, Homo sapiens
  source 1..20: mol_type = genomic RNA
tatttttgacatttactgtg

SEQ ID NO: 12375 - RNA, 20 nt, Homo sapiens
  source 1..20: mol_type = genomic RNA
atttttgacatttactgtgg

SEQ ID NO: 12376 - RNA, 20 nt, Homo sapiens
  source 1..20: mol_type = genomic RNA
tttttgacatttactgtgga

SEQ ID NO: 12377 - RNA, 20 nt, Homo sapiens
  source 1..20: mol_type = genomic RNA
ttttgacatttactgtggat

SEQ ID NO: 12378 - RNA, 20 nt, Homo sapiens
  source 1..20: mol_type = genomic RNA
tttgacatttactgtggata

SEQ ID NO: 12379 - RNA, 20 nt, Homo sapiens
  source 1..20: mol_type = genomic RNA
ttgacatttactgtggataa

SEQ ID NO: 12380 - RNA, 20 nt, Homo sapiens
  source 1..20: mol_type = genomic RNA
tgacatttactgtggataaa

SEQ ID NO: 12381 - RNA, 20 nt, Homo sapiens
  source 1..20: mol_type = genomic RNA
gacatttactgtggataaat

SEQ ID NO: 12382 - RNA, 20 nt, Homo sapiens
  source 1..20: mol_type = genomic RNA
acatttactgtggataaatt

SEQ ID NO: 12383 - RNA, 20 nt, Homo sapiens
  source 1..20: mol_type = genomic RNA
catttactgtggataaattg

SEQ ID NO: 12384 - RNA, 20 nt, Homo sapiens
  source 1..20: mol_type = genomic RNA
atttactgtggataaattgt

SEQ ID NO: 12385 - RNA, 20 nt, Homo sapiens
  source 1..20: mol_type = genomic RNA
tttactgtggataaattgtt

SEQ ID NO: 12386 - RNA, 20 nt, Homo sapiens
  source 1..20: mol_type = genomic RNA
ttactgtggataaattgttt

SEQ ID NO: 12387 - RNA, 20 nt, Homo sapiens
  source 1..20: mol_type = genomic RNA
tactgtggataaattgtttt

SEQ ID NO: 12388 - RNA, 20 nt, Homo sapiens
  source 1..20: mol_type = genomic RNA
actgtggataaattgttttt

SEQ ID NO: 12389 - RNA, 20 nt, Homo sapiens
  source 1..20: mol_type = genomic RNA
ctgtggataaattgttttta

SEQ ID NO: 12390 - RNA, 20 nt, Homo sapiens
  source 1..20: mol_type = genomic RNA
tgtggataaattgtttttaa

SEQ ID NO: 12391 - RNA, 20 nt, Homo sapiens
  source 1..20: mol_type = genomic RNA
gtggataaattgtttttaag

SEQ ID NO: 12392 - RNA, 20 nt, Homo sapiens
  source 1..20: mol_type = genomic RNA
tggataaattgtttttaagt

SEQ ID NO: 12393 - RNA, 20 nt, Homo sapiens
  source 1..20: mol_type = genomic RNA
ggataaattgtttttaagtt

SEQ ID NO: 12394 - RNA, 20 nt, Homo sapiens
  source 1..20: mol_type = genomic RNA
gataaattgtttttaagttt

SEQ ID NO: 12395 - RNA, 20 nt, Homo sapiens
  source 1..20: mol_type = genomic RNA
ataaattgtttttaagtttt

SEQ ID NO: 12396 - RNA, 20 nt, Homo sapiens
  source 1..20: mol_type = genomic RNA
taaattgtttttaagttttc

SEQ ID NO: 12397 - RNA, 20 nt, Homo sapiens
  source 1..20: mol_type = genomic RNA
aaattgtttttaagttttca

SEQ ID NO: 12398 - RNA, 20 nt, Homo sapiens
  source 1..20: mol_type = genomic RNA
aattgtttttaagttttcat

SEQ ID NO: 12399 - RNA, 20 nt, Homo sapiens
  source 1..20: mol_type = genomic RNA
attgtttttaagttttcatg

SEQ ID NO: 12400 - RNA, 20 nt, Homo sapiens
  source 1..20: mol_type = genomic RNA
ttgtttttaagttttcatga

SEQ ID NO: 12401 - RNA, 20 nt, Homo sapiens
  source 1..20: mol_type = genomic RNA
tgtttttaagttttcatgaa

SEQ ID NO: 12402 - RNA, 20 nt, Homo sapiens
  source 1..20: mol_type = genomic RNA
gtttttaagttttcatgaat

SEQ ID NO: 12403 - RNA, 20 nt, Homo sapiens
  source 1..20: mol_type = genomic RNA
tttttaagttttcatgaatg

SEQ ID NO: 12404 - RNA, 20 nt, Homo sapiens
  source 1..20: mol_type = genomic RNA
ttttaagttttcatgaatga

SEQ ID NO: 12405 - RNA, 20 nt, Homo sapiens
  source 1..20: mol_type = genomic RNA
tttaagttttcatgaatgaa

SEQ ID NO: 12406 - RNA, 20 nt, Homo sapiens
  source 1..20: mol_type = genomic RNA
ttaagttttcatgaatgaat

SEQ ID NO: 12407 - RNA, 20 nt, Homo sapiens
  source 1..20: mol_type = genomic RNA
taagttttcatgaatgaatt

SEQ ID NO: 12408 - RNA, 20 nt, Homo sapiens
  source 1..20: mol_type = genomic RNA
aagttttcatgaatgaattg

SEQ ID NO: 12409 - RNA, 20 nt, Homo sapiens
  source 1..20: mol_type = genomic RNA
agttttcatgaatgaattgc

SEQ ID NO: 12410 - RNA, 20 nt, Homo sapiens
  source 1..20: mol_type = genomic RNA
gttttcatgaatgaattgct

SEQ ID NO: 12411 - RNA, 20 nt, Homo sapiens
  source 1..20: mol_type = genomic RNA
ttttcatgaatgaattgcta

SEQ ID NO: 12412 - RNA, 20 nt, Homo sapiens
  source 1..20: mol_type = genomic RNA
tttcatgaatgaattgctaa

SEQ ID NO: 12413 - RNA, 20 nt, Homo sapiens
  source 1..20: mol_type = genomic RNA
ttcatgaatgaattgctaag

SEQ ID NO: 12414 - RNA, 20 nt, Homo sapiens
  source 1..20: mol_type = genomic RNA
tcatgaatgaattgctaaga

SEQ ID NO: 12415 - RNA, 20 nt, Homo sapiens
  source 1..20: mol_type = genomic RNA
catgaatgaattgctaagaa

SEQ ID NO: 12416 - RNA, 20 nt, Homo sapiens
  source 1..20: mol_type = genomic RNA
atgaatgaattgctaagaag

SEQ ID NO: 12417 - RNA, 20 nt, Homo sapiens
  source 1..20: mol_type = genomic RNA
tgaatgaattgctaagaagg

SEQ ID NO: 12418 - RNA, 20 nt, Homo sapiens
  source 1..20: mol_type = genomic RNA
gaatgaattgctaagaaggg

SEQ ID NO: 12419 - RNA, 20 nt, Homo sapiens
  source 1..20: mol_type = genomic RNA
aatgaattgctaagaaggga

SEQ ID NO: 12420 - RNA, 20 nt, Homo sapiens
  source 1..20: mol_type = genomic RNA
atgaattgctaagaagggaa

SEQ ID NO: 12421 - RNA, 20 nt, Homo sapiens
  source 1..20: mol_type = genomic RNA
tgaattgctaagaagggaaa

SEQ ID NO: 12422 - RNA, 20 nt, Homo sapiens
  source 1..20: mol_type = genomic RNA
gaattgctaagaagggaaaa

SEQ ID NO: 12423 - RNA, 20 nt, Homo sapiens
  source 1..20: mol_type = genomic RNA
aattgctaagaagggaaaat

SEQ ID NO: 12424 - RNA, 20 nt, Homo sapiens
  source 1..20: mol_type = genomic RNA
attgctaagaagggaaaata

SEQ ID NO: 12425 - RNA, 20 nt, Homo sapiens
  source 1..20: mol_type = genomic RNA
ttgctaagaagggaaaatat

SEQ ID NO: 12426 - RNA, 20 nt, Homo sapiens
  source 1..20: mol_type = genomic RNA
tgctaagaagggaaaatatc

SEQ ID NO: 12427 - RNA, 20 nt, Homo sapiens
  source 1..20: mol_type = genomic RNA
gctaagaagggaaaatatcc

SEQ ID NO: 12428 - RNA, 20 nt, Homo sapiens
  source 1..20: mol_type = genomic RNA
ctaagaagggaaaatatcca

SEQ ID NO: 12429 - RNA, 20 nt, Homo sapiens
  source 1..20: mol_type = genomic RNA
taagaagggaaaatatccat

SEQ ID NO: 12430 - RNA, 20 nt, Homo sapiens
  source 1..20: mol_type = genomic RNA
aagaagggaaaatatccatc

SEQ ID NO: 12431 - RNA, 20 nt, Homo sapiens
  source 1..20: mol_type = genomic RNA
agaagggaaaatatccatcc

SEQ ID NO: 12432 - RNA, 20 nt, Homo sapiens
  source 1..20: mol_type = genomic RNA
gaagggaaaatatccatcct

SEQ ID NO: 12433 - RNA, 20 nt, Homo sapiens
  source 1..20: mol_type = genomic RNA
aagggaaaatatccatcctg

SEQ ID NO: 12434 - RNA, 20 nt, Homo sapiens
  source 1..20: mol_type = genomic RNA
agggaaaatatccatcctga

SEQ ID NO: 12435 - RNA, 20 nt, Homo sapiens
  source 1..20: mol_type = genomic RNA
gggaaaatatccatcctgaa

SEQ ID NO: 12436 - RNA, 20 nt, Homo sapiens
  source 1..20: mol_type = genomic RNA
ggaaaatatccatcctgaag

SEQ ID NO: 12437 - RNA, 20 nt, Homo sapiens
  source 1..20: mol_type = genomic RNA
gaaaatatccatcctgaagg

SEQ ID NO: 12438 - RNA, 20 nt, Homo sapiens
  source 1..20: mol_type = genomic RNA
aaaatatccatcctgaaggt

SEQ ID NO: 12439 - RNA, 20 nt, Homo sapiens
  source 1..20: mol_type = genomic RNA
aaatatccatcctgaaggtg

SEQ ID NO: 12440 - RNA, 20 nt, Homo sapiens
  source 1..20: mol_type = genomic RNA
aatatccatcctgaaggtgt

SEQ ID NO: 12441 - RNA, 20 nt, Homo sapiens
  source 1..20: mol_type = genomic RNA
atatccatcctgaaggtgtt

SEQ ID NO: 12442 - RNA, 20 nt, Homo sapiens
  source 1..20: mol_type = genomic RNA
tatccatcctgaaggtgttt

SEQ ID NO: 12443 - RNA, 20 nt, Homo sapiens
  source 1..20: mol_type = genomic RNA
atccatcctgaaggtgtttt

SEQ ID NO: 12444 - RNA, 20 nt, Homo sapiens
  source 1..20: mol_type = genomic RNA
tccatcctgaaggtgttttt

SEQ ID NO: 12445 - RNA, 20 nt, Homo sapiens
  source 1..20: mol_type = genomic RNA
ccatcctgaaggtgtttttc

SEQ ID NO: 12446 - RNA, 20 nt, Homo sapiens
  source 1..20: mol_type = genomic RNA
catcctgaaggtgtttttca

SEQ ID NO: 12447 - RNA, 20 nt, Homo sapiens
  source 1..20: mol_type = genomic RNA
atcctgaaggtgtttttcat

SEQ ID NO: 12448 - RNA, 20 nt, Homo sapiens
  source 1..20: mol_type = genomic RNA
tcctgaaggtgtttttcatt

SEQ ID NO: 12449 - RNA, 20 nt, Homo sapiens
  source 1..20: mol_type = genomic RNA
cctgaaggtgtttttcattc

SEQ ID NO: 12450 - RNA, 20 nt, Homo sapiens
  source 1..20: mol_type = genomic RNA
ctgaaggtgtttttcattca

SEQ ID NO: 12451 - RNA, 20 nt, Homo sapiens
  source 1..20: mol_type = genomic RNA
tgaaggtgtttttcattcac

SEQ ID NO: 12452 - RNA, 20 nt, Homo sapiens
  source 1..20: mol_type = genomic RNA
gaaggtgtttttcattcact

SEQ ID NO: 12453 - RNA, 20 nt, Homo sapiens
  source 1..20: mol_type = genomic RNA
aaggtgtttttcattcactt

SEQ ID NO: 12454 - RNA, 20 nt, Homo sapiens
  source 1..20: mol_type = genomic RNA
aggtgtttttcattcacttt

SEQ ID NO: 12455 - RNA, 20 nt, Homo sapiens
  source 1..20: mol_type = genomic RNA
ggtgtttttcattcacttta

SEQ ID NO: 12456 - RNA, 20 nt, Homo sapiens
  source 1..20: mol_type = genomic RNA
gtgtttttcattcactttaa

SEQ ID NO: 12457 - RNA, 20 nt, Homo sapiens
  source 1..20: mol_type = genomic RNA
tgtttttcattcactttaat

SEQ ID NO: 12458 - RNA, 20 nt, Homo sapiens
  source 1..20: mol_type = genomic RNA
gtttttcattcactttaata

SEQ ID NO: 12459 - RNA, 20 nt, Homo sapiens
  source 1..20: mol_type = genomic RNA
tttttcattcactttaatag

SEQ ID NO: 12460 - RNA, 20 nt, Homo sapiens
  source 1..20: mol_type = genomic RNA
ttttcattcactttaataga

SEQ ID NO: 12461 - RNA, 20 nt, Homo sapiens
  source 1..20: mol_type = genomic RNA
tttcattcactttaatagaa

SEQ ID NO: 12462 - RNA, 20 nt, Homo sapiens
  source 1..20: mol_type = genomic RNA
ttcattcactttaatagaag

SEQ ID NO: 12463 - RNA, 20 nt, Homo sapiens
  source 1..20: mol_type = genomic RNA
tcattcactttaatagaagg

SEQ ID NO: 12464 - RNA, 20 nt, Homo sapiens
  source 1..20: mol_type = genomic RNA
cattcactttaatagaaggg

SEQ ID NO: 12465 - RNA, 20 nt, Homo sapiens
  source 1..20: mol_type = genomic RNA
attcactttaatagaagggc

SEQ ID NO: 12466 - RNA, 20 nt, Homo sapiens
  source 1..20: mol_type = genomic RNA
ttcactttaatagaagggca

SEQ ID NO: 12467 - RNA, 20 nt, Homo sapiens
  source 1..20: mol_type = genomic RNA
tcactttaatagaagggcaa

SEQ ID NO: 12468 - RNA, 20 nt, Homo sapiens
  source 1..20: mol_type = genomic RNA
cactttaatagaagggcaaa

SEQ ID NO: 12469 - RNA, 20 nt, Homo sapiens
  source 1..20: mol_type = genomic RNA
actttaatagaagggcaaat

SEQ ID NO: 12470 - RNA, 20 nt, Homo sapiens
  source 1..20: mol_type = genomic RNA
ctttaatagaagggcaaata

SEQ ID NO: 12471 - RNA, 20 nt, Homo sapiens
  source 1..20: mol_type = genomic RNA
tttaatagaagggcaaatat

SEQ ID NO: 12472 - RNA, 20 nt, Homo sapiens
  source 1..20: mol_type = genomic RNA
ttaatagaagggcaaatatt

SEQ ID NO: 12473 - RNA, 20 nt, Homo sapiens
  source 1..20: mol_type = genomic RNA
taatagaagggcaaatattt

SEQ ID NO: 12474 - RNA, 20 nt, Homo sapiens
  source 1..20: mol_type = genomic RNA
aatagaagggcaaatattta

SEQ ID NO: 12475 - RNA, 20 nt, Homo sapiens
  source 1..20: mol_type = genomic RNA
atagaagggcaaatatttat

SEQ ID NO: 12476 - RNA, 20 nt, Homo sapiens
  source 1..20: mol_type = genomic RNA
tagaagggcaaatatttata

SEQ ID NO: 12477 - RNA, 20 nt, Homo sapiens
  source 1..20: mol_type = genomic RNA
agaagggcaaatatttataa

SEQ ID NO: 12478 - RNA, 20 nt, Homo sapiens
  source 1..20: mol_type = genomic RNA
gaagggcaaatatttataag

SEQ ID NO: 12479 - RNA, 20 nt, Homo sapiens
  source 1..20: mol_type = genomic RNA
aagggcaaatatttataagc

SEQ ID NO: 12480 - RNA, 20 nt, Homo sapiens
  source 1..20: mol_type = genomic RNA
agggcaaatatttataagct

SEQ ID NO: 12481 - RNA, 20 nt, Homo sapiens
  source 1..20: mol_type = genomic RNA
gggcaaatatttataagcta

SEQ ID NO: 12482 - RNA, 20 nt, Homo sapiens
  source 1..20: mol_type = genomic RNA
ggcaaatatttataagctat

SEQ ID NO: 12483 - RNA, 20 nt, Homo sapiens
  source 1..20: mol_type = genomic RNA
gcaaatatttataagctatt

SEQ ID NO: 12484 - RNA, 20 nt, Homo sapiens
  source 1..20: mol_type = genomic RNA
caaatatttataagctattt

SEQ ID NO: 12485 - RNA, 20 nt, Homo sapiens
  source 1..20: mol_type = genomic RNA
aaatatttataagctatttc

SEQ ID NO: 12486 - RNA, 20 nt, Homo sapiens
  source 1..20: mol_type = genomic RNA
aatatttataagctatttct

SEQ ID NO: 12487 - RNA, 20 nt, Homo sapiens
  source 1..20: mol_type = genomic RNA
atatttataagctatttctg

SEQ ID NO: 12488 - RNA, 20 nt, Homo sapiens
  source 1..20: mol_type = genomic RNA
tatttataagctatttctgt

SEQ ID NO: 12489 - RNA, 20 nt, Homo sapiens
  source 1..20: mol_type = genomic RNA
atttataagctatttctgta

SEQ ID NO: 12490 - RNA, 20 nt, Homo sapiens
  source 1..20: mol_type = genomic RNA
tttataagctatttctgtac

SEQ ID NO: 12491 - RNA, 20 nt, Homo sapiens
  source 1..20: mol_type = genomic RNA
ttataagctatttctgtacc

SEQ ID NO: 12492 - RNA, 20 nt, Homo sapiens
  source 1..20: mol_type = genomic RNA
tataagctatttctgtacca

SEQ ID NO: 12493 - RNA, 20 nt, Homo sapiens
  source 1..20: mol_type = genomic RNA
ataagctatttctgtaccaa

SEQ ID NO: 12494 - RNA, 20 nt, Homo sapiens
  source 1..20: mol_type = genomic RNA
taagctatttctgtaccaaa

SEQ ID NO: 12495 - RNA, 20 nt, Homo sapiens
  source 1..20: mol_type = genomic RNA
aagctatttctgtaccaaag

SEQ ID NO: 12496 - RNA, 20 nt, Homo sapiens
  source 1..20: mol_type = genomic RNA
agctatttctgtaccaaagt

SEQ ID NO: 12497 - RNA, 20 nt, Homo sapiens
  source 1..20: mol_type = genomic RNA
gctatttctgtaccaaagtg

SEQ ID NO: 12498 - RNA, 20 nt, Homo sapiens
  source 1..20: mol_type = genomic RNA
ctatttctgtaccaaagtgt

SEQ ID NO: 12499 - RNA, 20 nt, Homo sapiens
  source 1..20: mol_type = genomic RNA
tatttctgtaccaaagtgtt

SEQ ID NO: 12500 - RNA, 20 nt, Homo sapiens
  source 1..20: mol_type = genomic RNA
atttctgtaccaaagtgttt

SEQ ID NO: 12501 - RNA, 20 nt, Homo sapiens
  source 1..20: mol_type = genomic RNA
tttctgtaccaaagtgtttg

SEQ ID NO: 12502 - RNA, 20 nt, Homo sapiens
  source 1..20: mol_type = genomic RNA
ttctgtaccaaagtgtttgt

SEQ ID NO: 12503 - RNA, 20 nt, Homo sapiens
  source 1..20: mol_type = genomic RNA
tctgtaccaaagtgtttgtg

SEQ ID NO: 12504 - RNA, 20 nt, Homo sapiens
  source 1..20: mol_type = genomic RNA
ctgtaccaaagtgtttgtgg

SEQ ID NO: 12505 - RNA, 20 nt, Homo sapiens
  source 1..20: mol_type = genomic RNA
tgtaccaaagtgtttgtgga

SEQ ID NO: 12506 - RNA, 20 nt, Homo sapiens
  source 1..20: mol_type = genomic RNA
gtaccaaagtgtttgtggaa

SEQ ID NO: 12507 - RNA, 20 nt, Homo sapiens
  source 1..20: mol_type = genomic RNA
taccaaagtgtttgtggaaa

SEQ ID NO: 12508 - RNA, 20 nt, Homo sapiens
  source 1..20: mol_type = genomic RNA
accaaagtgtttgtggaaac

SEQ ID NO: 12509 - RNA, 20 nt, Homo sapiens
  source 1..20: mol_type = genomic RNA
ccaaagtgtttgtggaaaca

SEQ ID NO: 12510 - RNA, 20 nt, Homo sapiens
  source 1..20: mol_type = genomic RNA
caaagtgtttgtggaaacaa

SEQ ID NO: 12511 - RNA, 20 nt, Homo sapiens
  source 1..20: mol_type = genomic RNA
aaagtgtttgtggaaacaaa

SEQ ID NO: 12512 - RNA, 20 nt, Homo sapiens
  source 1..20: mol_type = genomic RNA
aagtgtttgtggaaacaaac

SEQ ID NO: 12513 - RNA, 20 nt, Homo sapiens
  source 1..20: mol_type = genomic RNA
agtgtttgtggaaacaaaca

SEQ ID NO: 12514 - RNA, 20 nt, Homo sapiens
  source 1..20: mol_type = genomic RNA
gtgtttgtggaaacaaacat

SEQ ID NO: 12515 - RNA, 20 nt, Homo sapiens
  source 1..20: mol_type = genomic RNA
tgtttgtggaaacaaacatg

SEQ ID NO: 12516 - RNA, 20 nt, Homo sapiens
  source 1..20: mol_type = genomic RNA
gtttgtggaaacaaacatgt

SEQ ID NO: 12517 - RNA, 20 nt, Homo sapiens
  source 1..20: mol_type = genomic RNA
tttgtggaaacaaacatgta

SEQ ID NO: 12518 - RNA, 20 nt, Homo sapiens
  source 1..20: mol_type = genomic RNA
ttgtggaaacaaacatgtaa

SEQ ID NO: 12519 - RNA, 20 nt, Homo sapiens
  source 1..20: mol_type = genomic RNA
tgtggaaacaaacatgtaag

SEQ ID NO: 12520 - RNA, 20 nt, Homo sapiens
  source 1..20: mol_type = genomic RNA
gtggaaacaaacatgtaagc

SEQ ID NO: 12521 - RNA, 20 nt, Homo sapiens
  source 1..20: mol_type = genomic RNA
tggaaacaaacatgtaagca

SEQ ID NO: 12522 - RNA, 20 nt, Homo sapiens
  source 1..20: mol_type = genomic RNA
ggaaacaaacatgtaagcat

SEQ ID NO: 12523 - RNA, 20 nt, Homo sapiens
  source 1..20: mol_type = genomic RNA
gaaacaaacatgtaagcata

SEQ ID NO: 12524 - RNA, 20 nt, Homo sapiens
  source 1..20: mol_type = genomic RNA
aaacaaacatgtaagcataa

SEQ ID NO: 12525 - RNA, 20 nt, Homo sapiens
  source 1..20: mol_type = genomic RNA
aacaaacatgtaagcataac

SEQ ID NO: 12526 - RNA, 20 nt, Homo sapiens
  source 1..20: mol_type = genomic RNA
acaaacatgtaagcataact

SEQ ID NO: 12527 - RNA, 20 nt, Homo sapiens
  source 1..20: mol_type = genomic RNA
caaacatgtaagcataactt

SEQ ID NO: 12528 - RNA, 20 nt, Homo sapiens
  source 1..20: mol_type = genomic RNA
aaacatgtaagcataactta

SEQ ID NO: 12529 - RNA, 20 nt, Homo sapiens
  source 1..20: mol_type = genomic RNA
aacatgtaagcataacttat

SEQ ID NO: 12530 - RNA, 20 nt, Homo sapiens
  source 1..20: mol_type = genomic RNA
acatgtaagcataacttatt

SEQ ID NO: 12531 - RNA, 20 nt, Homo sapiens
  source 1..20: mol_type = genomic RNA
catgtaagcataacttattt

SEQ ID NO: 12532 - RNA, 20 nt, Homo sapiens
  source 1..20: mol_type = genomic RNA
atgtaagcataacttatttt

SEQ ID NO: 12533 - RNA, 20 nt, Homo sapiens
  source 1..20: mol_type = genomic RNA
tgtaagcataacttatttta

SEQ ID NO: 12534 - RNA, 20 nt, Homo sapiens
  source 1..20: mol_type = genomic RNA
gtaagcataacttattttaa

SEQ ID NO: 12535 - RNA, 20 nt, Homo sapiens
  source 1..20: mol_type = genomic RNA
taagcataacttattttaaa

SEQ ID NO: 12536 - RNA, 20 nt, Homo sapiens
  source 1..20: mol_type = genomic RNA
aagcataacttattttaaaa

SEQ ID NO: 12537 - RNA, 20 nt, Homo sapiens
  source 1..20: mol_type = genomic RNA
agcataacttattttaaaat

SEQ ID NO: 12538 - RNA, 20 nt, Homo sapiens
  source 1..20: mol_type = genomic RNA
gcataacttattttaaaata

SEQ ID NO: 12539 - RNA, 20 nt, Homo sapiens
  source 1..20: mol_type = genomic RNA
cataacttattttaaaatat

SEQ ID NO: 12540 - RNA, 20 nt, Homo sapiens
  source 1..20: mol_type = genomic RNA
ataacttattttaaaatatt

SEQ ID NO: 12541 - RNA, 20 nt, Homo sapiens
  source 1..20: mol_type = genomic RNA
taacttattttaaaatattt

SEQ ID NO: 12542 - RNA, 20 nt, Homo sapiens
  source 1..20: mol_type = genomic RNA
aacttattttaaaatattta

SEQ ID NO: 12543 - RNA, 20 nt, Homo sapiens
  source 1..20: mol_type = genomic RNA
acttattttaaaatatttat

SEQ ID NO: 12544 - RNA, 20 nt, Homo sapiens
  source 1..20: mol_type = genomic RNA
cttattttaaaatatttatt

SEQ ID NO: 12545 - RNA, 20 nt, Homo sapiens
  source 1..20: mol_type = genomic RNA
ttattttaaaatatttattt

SEQ ID NO: 12546 - RNA, 20 nt, Homo sapiens
  source 1..20: mol_type = genomic RNA
tattttaaaatatttattta

SEQ ID NO: 12547 - RNA, 20 nt, Homo sapiens
  source 1..20: mol_type = genomic RNA
attttaaaatatttatttat

SEQ ID NO: 12548 - RNA, 20 nt, Homo sapiens
  source 1..20: mol_type = genomic RNA
ttttaaaatatttatttata

SEQ ID NO: 12549 - RNA, 20 nt, Homo sapiens
  source 1..20: mol_type = genomic RNA
tttaaaatatttatttatat

SEQ ID NO: 12550 - RNA, 20 nt, Homo sapiens
  source 1..20: mol_type = genomic RNA
ttaaaatatttatttatata

SEQ ID NO: 12551 - RNA, 20 nt, Homo sapiens
  source 1..20: mol_type = genomic RNA
taaaatatttatttatataa

SEQ ID NO: 12552 - RNA, 20 nt, Homo sapiens
  source 1..20: mol_type = genomic RNA
aaaatatttatttatataac

SEQ ID NO: 12553 - RNA, 20 nt, Homo sapiens
  source 1..20: mol_type = genomic RNA
aaatatttatttatataact

SEQ ID NO: 12554 - RNA, 20 nt, Homo sapiens
  source 1..20: mol_type = genomic RNA
aatatttatttatataactt

SEQ ID NO: 12555 - RNA, 20 nt, Homo sapiens
  source 1..20: mol_type = genomic RNA
atatttatttatataacttg

SEQ ID NO: 12556 - RNA, 20 nt, Homo sapiens
  source 1..20: mol_type = genomic RNA
tatttatttatataacttgg

SEQ ID NO: 12557 - RNA, 20 nt, Homo sapiens
  source 1..20: mol_type = genomic RNA
atttatttatataacttggt

SEQ ID NO: 12558 - RNA, 20 nt, Homo sapiens
  source 1..20: mol_type = genomic RNA
tttatttatataacttggta

SEQ ID NO: 12559 - RNA, 20 nt, Homo sapiens
  source 1..20: mol_type = genomic RNA
ttatttatataacttggtaa

SEQ ID NO: 12560 - RNA, 20 nt, Homo sapiens
  source 1..20: mol_type = genomic RNA
tatttatataacttggtaat

SEQ ID NO: 12561 - RNA, 20 nt, Homo sapiens
  source 1..20: mol_type = genomic RNA
atttatataacttggtaatc

SEQ ID NO: 12562 - RNA, 20 nt, Homo sapiens
  source 1..20: mol_type = genomic RNA
tttatataacttggtaatca

SEQ ID NO: 12563 - RNA, 20 nt, Homo sapiens
  source 1..20: mol_type = genomic RNA
ttatataacttggtaatcat

SEQ ID NO: 12564 - RNA, 20 nt, Homo sapiens
  source 1..20: mol_type = genomic RNA
tatataacttggtaatcatg

SEQ ID NO: 12565 - RNA, 20 nt, Homo sapiens
  source 1..20: mol_type = genomic RNA
atataacttggtaatcatga

SEQ ID NO: 12566 - RNA, 20 nt, Homo sapiens
  source 1..20: mol_type = genomic RNA
tataacttggtaatcatgaa

SEQ ID NO: 12567 - RNA, 20 nt, Homo sapiens
  source 1..20: mol_type = genomic RNA
ataacttggtaatcatgaaa

SEQ ID NO: 12568 - RNA, 20 nt, Homo sapiens
  source 1..20: mol_type = genomic RNA
taacttggtaatcatgaaag

SEQ ID NO: 12569 - RNA, 20 nt, Homo sapiens
  source 1..20: mol_type = genomic RNA
aacttggtaatcatgaaagc

SEQ ID NO: 12570 - RNA, 20 nt, Homo sapiens
  source 1..20: mol_type = genomic RNA
acttggtaatcatgaaagca

SEQ ID NO: 12571 - RNA, 20 nt, Homo sapiens
  source 1..20: mol_type = genomic RNA
cttggtaatcatgaaagcat

SEQ ID NO: 12572 - RNA, 20 nt, Homo sapiens
  source 1..20: mol_type = genomic RNA
ttggtaatcatgaaagcatc

SEQ ID NO: 12573 - RNA, 20 nt, Homo sapiens
  source 1..20: mol_type = genomic RNA
tggtaatcatgaaagcatct

SEQ ID NO: 12574 - RNA, 20 nt, Homo sapiens
  source 1..20: mol_type = genomic RNA
ggtaatcatgaaagcatctg

SEQ ID NO: 12575 - RNA, 20 nt, Homo sapiens
  source 1..20: mol_type = genomic RNA
gtaatcatgaaagcatctga

SEQ ID NO: 12576 - RNA, 20 nt, Homo sapiens
  source 1..20: mol_type = genomic RNA
taatcatgaaagcatctgag

SEQ ID NO: 12577 - RNA, 20 nt, Homo sapiens
  source 1..20: mol_type = genomic RNA
aatcatgaaagcatctgagc

SEQ ID NO: 12578 - RNA, 20 nt, Homo sapiens
  source 1..20: mol_type = genomic RNA
atcatgaaagcatctgagct

SEQ ID NO: 12579 - RNA, 20 nt, Homo sapiens
  source 1..20: mol_type = genomic RNA
tcatgaaagcatctgagcta

SEQ ID NO: 12580 - RNA, 20 nt, Homo sapiens
  source 1..20: mol_type = genomic RNA
catgaaagcatctgagctaa

SEQ ID NO: 12581 - RNA, 20 nt, Homo sapiens
  source 1..20: mol_type = genomic RNA
atgaaagcatctgagctaac

SEQ ID NO: 12582 - RNA, 20 nt, Homo sapiens
  source 1..20: mol_type = genomic RNA
tgaaagcatctgagctaact

SEQ ID NO: 12583 - RNA, 20 nt, Homo sapiens
  source 1..20: mol_type = genomic RNA
gaaagcatctgagctaactt

SEQ ID NO: 12584 - RNA, 20 nt, Homo sapiens
  source 1..20: mol_type = genomic RNA
aaagcatctgagctaactta

SEQ ID NO: 12585 - RNA, 20 nt, Homo sapiens
  source 1..20: mol_type = genomic RNA
aagcatctgagctaacttat

SEQ ID NO: 12586 - RNA, 20 nt, Homo sapiens
  source 1..20: mol_type = genomic RNA
agcatctgagctaacttata

SEQ ID NO: 12587 - RNA, 20 nt, Homo sapiens
  source 1..20: mol_type = genomic RNA
gcatctgagctaacttatat

SEQ ID NO: 12588 - RNA, 20 nt, Homo sapiens
  source 1..20: mol_type = genomic RNA
catctgagctaacttatatt

SEQ ID NO: 12589 - RNA, 20 nt, Homo sapiens
  source 1..20: mol_type = genomic RNA
atctgagctaacttatattt

SEQ ID NO: 12590 - RNA, 20 nt, Homo sapiens
  source 1..20: mol_type = genomic RNA
tctgagctaacttatattta

SEQ ID NO: 12591 - RNA, 20 nt, Homo sapiens
  source 1..20: mol_type = genomic RNA
ctgagctaacttatatttat

SEQ ID NO: 12592 - RNA, 20 nt, Homo sapiens
  source 1..20: mol_type = genomic RNA
tgagctaacttatatttatt

SEQ ID NO: 12593 - RNA, 20 nt, Homo sapiens
  source 1..20: mol_type = genomic RNA
gagctaacttatatttattt

SEQ ID NO: 12594 - RNA, 20 nt, Homo sapiens
  source 1..20: mol_type = genomic RNA
agctaacttatatttattta

SEQ ID NO: 12595 - RNA, 20 nt, Homo sapiens
  source 1..20: mol_type = genomic RNA
gctaacttatatttatttat

SEQ ID NO: 12596 - RNA, 20 nt, Homo sapiens
  source 1..20: mol_type = genomic RNA
ctaacttatatttatttatg

SEQ ID NO: 12597 - RNA, 20 nt, Homo sapiens
  source 1..20: mol_type = genomic RNA
taacttatatttatttatgt

SEQ ID NO: 12598 - RNA, 20 nt, Homo sapiens
  source 1..20: mol_type = genomic RNA
aacttatatttatttatgtt

SEQ ID NO: 12599 - RNA, 20 nt, Homo sapiens
  source 1..20: mol_type = genomic RNA
acttatatttatttatgtta

SEQ ID NO: 12600 - RNA, 20 nt, Homo sapiens
  source 1..20: mol_type = genomic RNA
cttatatttatttatgttat

SEQ ID NO: 12601 - RNA, 20 nt, Homo sapiens
  source 1..20: mol_type = genomic RNA
ttatatttatttatgttata

SEQ ID NO: 12602 - RNA, 20 nt, Homo sapiens
  source 1..20: mol_type = genomic RNA
tatatttatttatgttatat

SEQ ID NO: 12603 - RNA, 20 nt, Homo sapiens
  source 1..20: mol_type = genomic RNA
atatttatttatgttatatt

SEQ ID NO: 12604 - RNA, 20 nt, Homo sapiens
  source 1..20: mol_type = genomic RNA
tatttatttatgttatattt

SEQ ID NO: 12605 - RNA, 20 nt, Homo sapiens
  source 1..20: mol_type = genomic RNA
atttatttatgttatattta

SEQ ID NO: 12606 - RNA, 20 nt, Homo sapiens
  source 1..20: mol_type = genomic RNA
tttatttatgttatatttat

SEQ ID NO: 12607 - RNA, 20 nt, Homo sapiens
  source 1..20: mol_type = genomic RNA
ttatttatgttatatttatt

SEQ ID NO: 12608 - RNA, 20 nt, Homo sapiens
  source 1..20: mol_type = genomic RNA
tatttatgttatatttatta

SEQ ID NO: 12609 - RNA, 20 nt, Homo sapiens
  source 1..20: mol_type = genomic RNA
atttatgttatatttattaa

SEQ ID NO: 12610 - RNA, 20 nt, Homo sapiens
  source 1..20: mol_type = genomic RNA
tttatgttatatttattaaa

SEQ ID NO: 12611 - RNA, 20 nt, Homo sapiens
  source 1..20: mol_type = genomic RNA
ttatgttatatttattaaat

SEQ ID NO: 12612 - RNA, 20 nt, Homo sapiens
  source 1..20: mol_type = genomic RNA
tatgttatatttattaaatt

SEQ ID NO: 12613 - RNA, 20 nt, Homo sapiens
  source 1..20: mol_type = genomic RNA
atgttatatttattaaatta

SEQ ID NO: 12614 - RNA, 20 nt, Homo sapiens
  source 1..20: mol_type = genomic RNA
tgttatatttattaaattat

SEQ ID NO: 12615 - RNA, 20 nt, Homo sapiens
  source 1..20: mol_type = genomic RNA
gttatatttattaaattatt

SEQ ID NO: 12616 - RNA, 20 nt, Homo sapiens
  source 1..20: mol_type = genomic RNA
ttatatttattaaattattt

SEQ ID NO: 12617 - RNA, 20 nt, Homo sapiens
  source 1..20: mol_type = genomic RNA
tatatttattaaattattta

SEQ ID NO: 12618 - RNA, 20 nt, Homo sapiens
  source 1..20: mol_type = genomic RNA
atatttattaaattatttat

SEQ ID NO: 12619 - RNA, 20 nt, Homo sapiens
  source 1..20: mol_type = genomic RNA
tatttattaaattatttatc

SEQ ID NO: 12620 - RNA, 20 nt, Homo sapiens
  source 1..20: mol_type = genomic RNA
atttattaaattatttatca

SEQ ID NO: 12621 - RNA, 20 nt, Homo sapiens
  source 1..20: mol_type = genomic RNA
tttattaaattatttatcaa

SEQ ID NO: 12622 - RNA, 20 nt, Homo sapiens
  source 1..20: mol_type = genomic RNA
ttattaaattatttatcaag

SEQ ID NO: 12623 - RNA, 20 nt, Homo sapiens
  source 1..20: mol_type = genomic RNA
tattaaattatttatcaagt

SEQ ID NO: 12624 - RNA, 20 nt, Homo sapiens
  source 1..20: mol_type = genomic RNA
attaaattatttatcaagtg

SEQ ID NO: 12625 - RNA, 20 nt, Homo sapiens
  source 1..20: mol_type = genomic RNA
ttaaattatttatcaagtgt

SEQ ID NO: 12626 - RNA, 20 nt, Homo sapiens
  source 1..20: mol_type = genomic RNA
taaattatttatcaagtgta

SEQ ID NO: 12627 - RNA, 20 nt, Homo sapiens
  source 1..20: mol_type = genomic RNA
aaattatttatcaagtgtat

SEQ ID NO: 12628 - RNA, 20 nt, Homo sapiens
  source 1..20: mol_type = genomic RNA
aattatttatcaagtgtatt

SEQ ID NO: 12629 - RNA, 20 nt, Homo sapiens
  source 1..20: mol_type = genomic RNA
attatttatcaagtgtattt

SEQ ID NO: 12630 - RNA, 20 nt, Homo sapiens
  source 1..20: mol_type = genomic RNA
ttatttatcaagtgtatttg

SEQ ID NO: 12631 - RNA, 20 nt, Homo sapiens
  source 1..20: mol_type = genomic RNA
tatttatcaagtgtatttga

SEQ ID NO: 12632 - RNA, 20 nt, Homo sapiens
  source 1..20: mol_type = genomic RNA
atttatcaagtgtatttgaa

SEQ ID NO: 12633 - RNA, 20 nt, Homo sapiens
  source 1..20: mol_type = genomic RNA
tttatcaagtgtatttgaaa

SEQ ID NO: 12634 - RNA, 20 nt, Homo sapiens
  source 1..20: mol_type = genomic RNA
ttatcaagtgtatttgaaaa

SEQ ID NO: 12635 - RNA, 20 nt, Homo sapiens
  source 1..20: mol_type = genomic RNA
tatcaagtgtatttgaaaaa

SEQ ID NO: 12636 - RNA, 20 nt, Homo sapiens
  source 1..20: mol_type = genomic RNA
atcaagtgtatttgaaaaat

SEQ ID NO: 12637 - RNA, 20 nt, Homo sapiens
  source 1..20: mol_type = genomic RNA
tcaagtgtatttgaaaaata

SEQ ID NO: 12638 - RNA, 20 nt, Homo sapiens
  source 1..20: mol_type = genomic RNA
caagtgtatttgaaaaatat

SEQ ID NO: 12639 - RNA, 20 nt, Homo sapiens
  source 1..20: mol_type = genomic RNA
aagtgtatttgaaaaatatt

SEQ ID NO: 12640 - RNA, 20 nt, Homo sapiens
  source 1..20: mol_type = genomic RNA
agtgtatttgaaaaatattt

SEQ ID NO: 12641 - RNA, 20 nt, Homo sapiens
  source 1..20: mol_type = genomic RNA
gtgtatttgaaaaatatttt

SEQ ID NO: 12642 - RNA, 20 nt, Homo sapiens
  source 1..20: mol_type = genomic RNA
tgtatttgaaaaatattttt

SEQ ID NO: 12643 - RNA, 20 nt, Homo sapiens
  source 1..20: mol_type = genomic RNA
gtatttgaaaaatattttta

SEQ ID NO: 12644 - RNA, 20 nt, Homo sapiens
  source 1..20: mol_type = genomic RNA
tatttgaaaaatatttttaa

SEQ ID NO: 12645 - RNA, 20 nt, Homo sapiens
  source 1..20: mol_type = genomic RNA
atttgaaaaatatttttaag

SEQ ID NO: 12646 - RNA, 20 nt, Homo sapiens
  source 1..20: mol_type = genomic RNA
tttgaaaaatatttttaagt

SEQ ID NO: 12647 - RNA, 20 nt, Homo sapiens
  source 1..20: mol_type = genomic RNA
ttgaaaaatatttttaagtg

SEQ ID NO: 12648 - RNA, 20 nt, Homo sapiens
  source 1..20: mol_type = genomic RNA
tgaaaaatatttttaagtgt

SEQ ID NO: 12649 - RNA, 20 nt, Homo sapiens
  source 1..20: mol_type = genomic RNA
gaaaaatatttttaagtgtt

SEQ ID NO: 12650 - RNA, 20 nt, Homo sapiens
  source 1..20: mol_type = genomic RNA
aaaaatatttttaagtgttc

SEQ ID NO: 12651 - RNA, 20 nt, Homo sapiens
  source 1..20: mol_type = genomic RNA
aaaatatttttaagtgttct

SEQ ID NO: 12652 - RNA, 20 nt, Homo sapiens
  source 1..20: mol_type = genomic RNA
aaatatttttaagtgttcta

SEQ ID NO: 12653 - RNA, 20 nt, Homo sapiens
  source 1..20: mol_type = genomic RNA
aatatttttaagtgttctaa

SEQ ID NO: 12654 - RNA, 20 nt, Homo sapiens
  source 1..20: mol_type = genomic RNA
atatttttaagtgttctaaa

SEQ ID NO: 12655 - RNA, 20 nt, Homo sapiens
  source 1..20: mol_type = genomic RNA
tatttttaagtgttctaaaa

SEQ ID NO: 12656 - RNA, 20 nt, Homo sapiens
  source 1..20: mol_type = genomic RNA
atttttaagtgttctaaaaa

SEQ ID NO: 12657 - RNA, 20 nt, Homo sapiens
  source 1..20: mol_type = genomic RNA
tttttaagtgttctaaaaat

SEQ ID NO: 12658 - RNA, 20 nt, Homo sapiens
  source 1..20: mol_type = genomic RNA
ttttaagtgttctaaaaata

SEQ ID NO: 12659 - RNA, 20 nt, Homo sapiens
  source 1..20: mol_type = genomic RNA
tttaagtgttctaaaaataa

SEQ ID NO: 12660 - RNA, 20 nt, Homo sapiens
  source 1..20: mol_type = genomic RNA
ttaagtgttctaaaaataaa

SEQ ID NO: 12661 - RNA, 20 nt, Homo sapiens
  source 1..20: mol_type = genomic RNA
taagtgttctaaaaataaaa

SEQ ID NO: 12662 - RNA, 20 nt, Homo sapiens
  source 1..20: mol_type = genomic RNA
aagtgttctaaaaataaaag

SEQ ID NO: 12663 - RNA, 20 nt, Homo sapiens
  source 1..20: mol_type = genomic RNA
agtgttctaaaaataaaagt

SEQ ID NO: 12664 - RNA, 20 nt, Homo sapiens
  source 1..20: mol_type = genomic RNA
gtgttctaaaaataaaagta

SEQ ID NO: 12665 - RNA, 20 nt, Homo sapiens
  source 1..20: mol_type = genomic RNA
tgttctaaaaataaaagtat

SEQ ID NO: 12666 - RNA, 20 nt, Homo sapiens
  source 1..20: mol_type = genomic RNA
gttctaaaaataaaagtatt

SEQ ID NO: 12667 - RNA, 20 nt, Homo sapiens
  source 1..20: mol_type = genomic RNA
ttctaaaaataaaagtattg

SEQ ID NO: 12668 - RNA, 20 nt, Homo sapiens
  source 1..20: mol_type = genomic RNA
tctaaaaataaaagtattga

SEQ ID NO: 12669 - RNA, 20 nt, Homo sapiens
  source 1..20: mol_type = genomic RNA
ctaaaaataaaagtattgaa

SEQ ID NO: 12670 - RNA, 20 nt, Homo sapiens
  source 1..20: mol_type = genomic RNA
taaaaataaaagtattgaat

SEQ ID NO: 12671 - RNA, 20 nt, Homo sapiens
  source 1..20: mol_type = genomic RNA
aaaaataaaagtattgaatt

SEQ ID NO: 12672 - RNA, 20 nt, Homo sapiens
  source 1..20: mol_type = genomic RNA
aaaataaaagtattgaatta

SEQ ID NO: 12673 - RNA, 20 nt, Homo sapiens
  source 1..20: mol_type = genomic RNA
aaataaaagtattgaattaa

SEQ ID NO: 12674 - RNA, 20 nt, Homo sapiens
  source 1..20: mol_type = genomic RNA
aataaaagtattgaattaaa

SEQ ID NO: 12675 - RNA, 20 nt, Homo sapiens
  source 1..20: mol_type = genomic RNA
ataaaagtattgaattaaag

SEQ ID NO: 12676 - RNA, 20 nt, Homo sapiens
  source 1..20: mol_type = genomic RNA
taaaagtattgaattaaagt

SEQ ID NO: 12677 - RNA, 20 nt, Homo sapiens
  source 1..20: mol_type = genomic RNA
aaaagtattgaattaaagtg

SEQ ID NO: 12678 - RNA, 20 nt, Homo sapiens
  source 1..20: mol_type = genomic RNA
aaagtattgaattaaagtga

SEQ ID NO: 12679 - RNA, 20 nt, Homo sapiens
  source 1..20: mol_type = genomic RNA
aagtattgaattaaagtgaa

SEQ ID NO: 12680 - RNA, 20 nt, Homo sapiens
  source 1..20: mol_type = genomic RNA
agtattgaattaaagtgaaa

SEQ ID NO: 12681 - RNA, 20 nt, Homo sapiens
  source 1..20: mol_type = genomic RNA
gtattgaattaaagtgaaaa

SEQ ID NO: 12682 - RNA, 20 nt, Homo sapiens
  source 1..20: mol_type = genomic RNA
tattgaattaaagtgaaaaa

SEQ ID NO: 12683 - RNA, 20 nt, Homo sapiens
  source 1..20: mol_type = genomic RNA
attgaattaaagtgaaaaaa

SEQ ID NO: 12684 - RNA, 20 nt, Homo sapiens
  source 1..20: mol_type = genomic RNA
ttgaattaaagtgaaaaaaa

SEQ ID NO: 12685 - RNA, 20 nt, Homo sapiens
  source 1..20: mol_type = genomic RNA
tgaattaaagtgaaaaaaaa

SEQ ID NO: 12686 - RNA, 20 nt, Homo sapiens
  source 1..20: mol_type = genomic RNA
cacttcctccccagacaggg

SEQ ID NO: 12687 - RNA, 20 nt, Homo sapiens
  source 1..20: mol_type = genomic RNA
acttcctccccagacagggg

SEQ ID NO: 12688 - RNA, 20 nt, Homo sapiens
  source 1..20: mol_type = genomic RNA
cttcctccccagacaggggt

SEQ ID NO: 12689 - RNA, 20 nt, Homo sapiens
  source 1..20: mol_type = genomic RNA
ttcctccccagacaggggta

SEQ ID NO: 12690 - RNA, 20 nt, Homo sapiens
  source 1..20: mol_type = genomic RNA
tcctccccagacaggggtag

SEQ ID NO: 12691 - RNA, 20 nt, Homo sapiens
  source 1..20: mol_type = genomic RNA
cctccccagacaggggtagt

SEQ ID NO: 12692 - RNA, 20 nt, Homo sapiens
  source 1..20: mol_type = genomic RNA
ctccccagacaggggtagtg

SEQ ID NO: 12693 - RNA, 20 nt, Homo sapiens
  source 1..20: mol_type = genomic RNA
tccccagacaggggtagtgc

SEQ ID NO: 12694 - RNA, 20 nt, Homo sapiens
  source 1..20: mol_type = genomic RNA
ccccagacaggggtagtgcg

SEQ ID NO: 12695 - RNA, 20 nt, Homo sapiens
  source 1..20: mol_type = genomic RNA
cccagacaggggtagtgcga

SEQ ID NO: 12696 - RNA, 20 nt, Homo sapiens
  source 1..20: mol_type = genomic RNA
ccagacaggggtagtgcgag

SEQ ID NO: 12697 - RNA, 20 nt, Homo sapiens
  source 1..20: mol_type = genomic RNA
cagacaggggtagtgcgagg

SEQ ID NO: 12698 - RNA, 20 nt, Homo sapiens
  source 1..20: mol_type = genomic RNA
agacaggggtagtgcgaggc

SEQ ID NO: 12699 - RNA, 20 nt, Homo sapiens
  source 1..20: mol_type = genomic RNA
gacaggggtagtgcgaggcc

SEQ ID NO: 12700 - RNA, 20 nt, Homo sapiens
  source 1..20: mol_type = genomic RNA
acaggggtagtgcgaggccg

SEQ ID NO: 12701 - RNA, 20 nt, Homo sapiens
  source 1..20: mol_type = genomic RNA
caggggtagtgcgaggccgg

SEQ ID NO: 12702 - RNA, 20 nt, Homo sapiens
  source 1..20: mol_type = genomic RNA
aggggtagtgcgaggccggg

SEQ ID NO: 12703 - RNA, 20 nt, Homo sapiens
  source 1..20: mol_type = genomic RNA
ggggtagtgcgaggccgggc

SEQ ID NO: 12704 - RNA, 20 nt, Homo sapiens
  source 1..20: mol_type = genomic RNA
gggtagtgcgaggccgggca

SEQ ID NO: 12705 - RNA, 20 nt, Homo sapiens
  source 1..20: mol_type = genomic RNA
ggtagtgcgaggccgggcac

SEQ ID NO: 12706 - RNA, 20 nt, Homo sapiens
  source 1..20: mol_type = genomic RNA
gtagtgcgaggccgggcaca

SEQ ID NO: 12707 - RNA, 20 nt, Homo sapiens
  source 1..20: mol_type = genomic RNA
tagtgcgaggccgggcacag

SEQ ID NO: 12708 - RNA, 20 nt, Homo sapiens
  source 1..20: mol_type = genomic RNA
agtgcgaggccgggcacagc

SEQ ID NO: 12709 - RNA, 20 nt, Homo sapiens
  source 1..20: mol_type = genomic RNA
gtgcgaggccgggcacagcc

SEQ ID NO: 12710 - RNA, 20 nt, Homo sapiens
  source 1..20: mol_type = genomic RNA
tgcgaggccgggcacagcct

SEQ ID NO: 12711 - RNA, 20 nt, Homo sapiens
  source 1..20: mol_type = genomic RNA
gcgaggccgggcacagcctt

SEQ ID NO: 12712 - RNA, 20 nt, Homo sapiens
  source 1..20: mol_type = genomic RNA
cgaggccgggcacagccttc

SEQ ID NO: 12713 - RNA, 20 nt, Homo sapiens
  source 1..20: mol_type = genomic RNA
gaggccgggcacagccttcc

SEQ ID NO: 12714 - RNA, 20 nt, Homo sapiens
  source 1..20: mol_type = genomic RNA
aggccgggcacagccttcct

SEQ ID NO: 12715 - RNA, 20 nt, Homo sapiens
  source 1..20: mol_type = genomic RNA
ggccgggcacagccttcctg

SEQ ID NO: 12716 - RNA, 20 nt, Homo sapiens
  source 1..20: mol_type = genomic RNA
gccgggcacagccttcctgt

SEQ ID NO: 12717 - RNA, 20 nt, Homo sapiens
  source 1..20: mol_type = genomic RNA
ccgggcacagccttcctgtg

SEQ ID NO: 12718 - RNA, 20 nt, Homo sapiens
  source 1..20: mol_type = genomic RNA
cgggcacagccttcctgtgt

SEQ ID NO: 12719 - RNA, 20 nt, Homo sapiens
  source 1..20: mol_type = genomic RNA
gggcacagccttcctgtgtg

SEQ ID NO: 12720 - RNA, 20 nt, Homo sapiens
  source 1..20: mol_type = genomic RNA
ggcacagccttcctgtgtgg

SEQ ID NO: 12721 - RNA, 20 nt, Homo sapiens
  source 1..20: mol_type = genomic RNA
gcacagccttcctgtgtggt

SEQ ID NO: 12722 - RNA, 20 nt, Homo sapiens
  source 1..20: mol_type = genomic RNA
cacagccttcctgtgtggtt

SEQ ID NO: 12723 - RNA, 20 nt, Homo sapiens
  source 1..20: mol_type = genomic RNA
acagccttcctgtgtggttt

SEQ ID NO: 12724 - RNA, 20 nt, Homo sapiens
  source 1..20: mol_type = genomic RNA
cagccttcctgtgtggtttt

SEQ ID NO: 12725 - RNA, 20 nt, Homo sapiens
  source 1..20: mol_type = genomic RNA
agccttcctgtgtggtttta

SEQ ID NO: 12726 - RNA, 20 nt, Homo sapiens
  source 1..20: mol_type = genomic RNA
gccttcctgtgtggttttac

SEQ ID NO: 12727 - RNA, 20 nt, Homo sapiens
  source 1..20: mol_type = genomic RNA
ccttcctgtgtggttttacc

SEQ ID NO: 12728 - RNA, 20 nt, Homo sapiens
  source 1..20: mol_type = genomic RNA
cttcctgtgtggttttaccg

SEQ ID NO: 12729 - RNA, 20 nt, Homo sapiens
  source 1..20: mol_type = genomic RNA
ttcctgtgtggttttaccgc

SEQ ID NO: 12730 - RNA, 20 nt, Homo sapiens
  source 1..20: mol_type = genomic RNA
tcctgtgtggttttaccgcc

SEQ ID NO: 12731 - RNA, 20 nt, Homo sapiens
  source 1..20: mol_type = genomic RNA
cctgtgtggttttaccgccc

SEQ ID NO: 12732 - RNA, 20 nt, Homo sapiens
  source 1..20: mol_type = genomic RNA
ctgtgtggttttaccgccca

SEQ ID NO: 12733 - RNA, 20 nt, Homo sapiens
  source 1..20: mol_type = genomic RNA
tgtgtggttttaccgcccag

SEQ ID NO: 12734 - RNA, 20 nt, Homo sapiens
  source 1..20: mol_type = genomic RNA
gtgtggttttaccgcccaga

SEQ ID NO: 12735 - RNA, 20 nt, Homo sapiens
  source 1..20: mol_type = genomic RNA
tgtggttttaccgcccagag

SEQ ID NO: 12736 - RNA, 20 nt, Homo sapiens
  source 1..20: mol_type = genomic RNA
gtggttttaccgcccagaga

SEQ ID NO: 12737 - RNA, 20 nt, Homo sapiens
  source 1..20: mol_type = genomic RNA
tggttttaccgcccagagag

SEQ ID NO: 12738 - RNA, 20 nt, Homo sapiens
  source 1..20: mol_type = genomic RNA
ggttttaccgcccagagagc

SEQ ID NO: 12739 - RNA, 20 nt, Homo sapiens
  source 1..20: mol_type = genomic RNA
gttttaccgcccagagagcg

SEQ ID NO: 12740 - RNA, 20 nt, Homo sapiens
  source 1..20: mol_type = genomic RNA
ttttaccgcccagagagcgt

SEQ ID NO: 12741 - RNA, 20 nt, Homo sapiens
  source 1..20: mol_type = genomic RNA
tttaccgcccagagagcgtc

SEQ ID NO: 12742 - RNA, 20 nt, Homo sapiens
  source 1..20: mol_type = genomic RNA
ttaccgcccagagagcgtca

SEQ ID NO: 12743 - RNA, 20 nt, Homo sapiens
  source 1..20: mol_type = genomic RNA
taccgcccagagagcgtcat

SEQ ID NO: 12744 - RNA, 20 nt, Homo sapiens
  source 1..20: mol_type = genomic RNA
accgcccagagagcgtcatg

SEQ ID NO: 12745 - RNA, 20 nt, Homo sapiens
  source 1..20: mol_type = genomic RNA
ccgcccagagagcgtcatgg

SEQ ID NO: 12746 - RNA, 20 nt, Homo sapiens
  source 1..20: mol_type = genomic RNA
cgcccagagagcgtcatgga

SEQ ID NO: 12747 - RNA, 20 nt, Homo sapiens
  source 1..20: mol_type = genomic RNA
gcccagagagcgtcatggac

SEQ ID NO: 12748 - RNA, 20 nt, Homo sapiens
  source 1..20: mol_type = genomic RNA
cccagagagcgtcatggacc

SEQ ID NO: 12749 - RNA, 20 nt, Homo sapiens
  source 1..20: mol_type = genomic RNA
ccagagagcgtcatggacct

SEQ ID NO: 12750 - RNA, 20 nt, Homo sapiens
  source 1..20: mol_type = genomic RNA
cagagagcgtcatggacctg

SEQ ID NO: 12751 - RNA, 20 nt, Homo sapiens
  source 1..20: mol_type = genomic RNA
agagagcgtcatggacctgg

SEQ ID NO: 12752 - RNA, 20 nt, Homo sapiens
  source 1..20: mol_type = genomic RNA
gagagcgtcatggacctggg

SEQ ID NO: 12753 - RNA, 20 nt, Homo sapiens
  source 1..20: mol_type = genomic RNA
agagcgtcatggacctgggg

SEQ ID NO: 12754 - RNA, 20 nt, Homo sapiens
  source 1..20: mol_type = genomic RNA
gagcgtcatggacctgggga

SEQ ID NO: 12755 - RNA, 20 nt, Homo sapiens
  source 1..20: mol_type = genomic RNA
agcgtcatggacctggggaa

SEQ ID NO: 12756 - RNA, 20 nt, Homo sapiens
  source 1..20: mol_type = genomic RNA
gcgtcatggacctggggaaa

SEQ ID NO: 12757 - RNA, 20 nt, Homo sapiens
  source 1..20: mol_type = genomic RNA
cgtcatggacctggggaaac

SEQ ID NO: 12758 - RNA, 20 nt, Homo sapiens
  source 1..20: mol_type = genomic RNA
gtcatggacctggggaaacc

SEQ ID NO: 12759 - RNA, 20 nt, Homo sapiens
  source 1..20: mol_type = genomic RNA
tcatggacctggggaaacca

SEQ ID NO: 12760 - RNA, 20 nt, Homo sapiens
  source 1..20: mol_type = genomic RNA
catggacctggggaaaccaa

SEQ ID NO: 12761 - RNA, 20 nt, Homo sapiens
  source 1..20: mol_type = genomic RNA
atggacctggggaaaccaat

SEQ ID NO: 12762 - RNA, 20 nt, Homo sapiens
  source 1..20: mol_type = genomic RNA
tggacctggggaaaccaatg

SEQ ID NO: 12763 - RNA, 20 nt, Homo sapiens
  source 1..20: mol_type = genomic RNA
ggacctggggaaaccaatga

SEQ ID NO: 12764 - RNA, 20 nt, Homo sapiens
  source 1..20: mol_type = genomic RNA
gacctggggaaaccaatgaa

SEQ ID NO: 12765 - RNA, 20 nt, Homo sapiens
  source 1..20: mol_type = genomic RNA
acctggggaaaccaatgaaa

SEQ ID NO: 12766 - RNA, 20 nt, Homo sapiens
  source 1..20: mol_type = genomic RNA
cctggggaaaccaatgaaaa

SEQ ID NO: 12767 - RNA, 20 nt, Homo sapiens
  source 1..20: mol_type = genomic RNA
ctggggaaaccaatgaaaag

SEQ ID NO: 12768 - RNA, 20 nt, Homo sapiens
  source 1..20: mol_type = genomic RNA
tggggaaaccaatgaaaagc

SEQ ID NO: 12769 - RNA, 20 nt, Homo sapiens
  source 1..20: mol_type = genomic RNA
ggggaaaccaatgaaaagcg

SEQ ID NO: 12770 - RNA, 20 nt, Homo sapiens
  source 1..20: mol_type = genomic RNA
gggaaaccaatgaaaagcgt

SEQ ID NO: 12771 - RNA, 20 nt, Homo sapiens
  source 1..20: mol_type = genomic RNA
ggaaaccaatgaaaagcgtg

SEQ ID NO: 12772 - RNA, 20 nt, Homo sapiens
  source 1..20: mol_type = genomic RNA
gaaaccaatgaaaagcgtgc

SEQ ID NO: 12773 - RNA, 20 nt, Homo sapiens
  source 1..20: mol_type = genomic RNA
aaaccaatgaaaagcgtgct

SEQ ID NO: 12774 - RNA, 20 nt, Homo sapiens
  source 1..20: mol_type = genomic RNA
aaccaatgaaaagcgtgctg

SEQ ID NO: 12775 - RNA, 20 nt, Homo sapiens
  source 1..20: mol_type = genomic RNA
accaatgaaaagcgtgctgg

SEQ ID NO: 12776 - RNA, 20 nt, Homo sapiens
  source 1..20: mol_type = genomic RNA
ccaatgaaaagcgtgctggt

SEQ ID NO: 12777 - RNA, 20 nt, Homo sapiens
  source 1..20: mol_type = genomic RNA
caatgaaaagcgtgctggtg

SEQ ID NO: 12778 - RNA, 20 nt, Homo sapiens
  source 1..20: mol_type = genomic RNA
aatgaaaagcgtgctggtgg

SEQ ID NO: 12779 - RNA, 20 nt, Homo sapiens
  source 1..20: mol_type = genomic RNA
atgaaaagcgtgctggtggt

SEQ ID NO: 12780 - RNA, 20 nt, Homo sapiens
  source 1..20: mol_type = genomic RNA
tgaaaagcgtgctggtggtg

SEQ ID NO: 12781 - RNA, 20 nt, Homo sapiens
  source 1..20: mol_type = genomic RNA
gaaaagcgtgctggtggtgg

SEQ ID NO: 12782 - RNA, 20 nt, Homo sapiens
  source 1..20: mol_type = genomic RNA
aaaagcgtgctggtggtggc

SEQ ID NO: 12783 - RNA, 20 nt, Homo sapiens
  source 1..20: mol_type = genomic RNA
aaagcgtgctggtggtggct

SEQ ID NO: 12784 - RNA, 20 nt, Homo sapiens
  source 1..20: mol_type = genomic RNA
aagcgtgctggtggtggctc

SEQ ID NO: 12785 - RNA, 20 nt, Homo sapiens
  source 1..20: mol_type = genomic RNA
agcgtgctggtggtggctct

SEQ ID NO: 12786 - RNA, 20 nt, Homo sapiens
  source 1..20: mol_type = genomic RNA
gcgtgctggtggtggctctc

SEQ ID NO: 12787 - RNA, 20 nt, Homo sapiens
  source 1..20: mol_type = genomic RNA
cgtgctggtggtggctctcc

SEQ ID NO: 12788 - RNA, 20 nt, Homo sapiens
  source 1..20: mol_type = genomic RNA
gtgctggtggtggctctcct

SEQ ID NO: 12789 - RNA, 20 nt, Homo sapiens
  source 1..20: mol_type = genomic RNA
tgctggtggtggctctcctt

SEQ ID NO: 12790 - RNA, 20 nt, Homo sapiens
  source 1..20: mol_type = genomic RNA
gctggtggtggctctccttg

SEQ ID NO: 12791 - RNA, 20 nt, Homo sapiens
  source 1..20: mol_type = genomic RNA
ctggtggtggctctccttgt

SEQ ID NO: 12792 - RNA, 20 nt, Homo sapiens
  source 1..20: mol_type = genomic RNA
tggtggtggctctccttgtc

SEQ ID NO: 12793 - RNA, 20 nt, Homo sapiens
  source 1..20: mol_type = genomic RNA
ggtggtggctctccttgtca

SEQ ID NO: 12794 - RNA, 20 nt, Homo sapiens
  source 1..20: mol_type = genomic RNA
gtggtggctctccttgtcat

SEQ ID NO: 12795 - RNA, 20 nt, Homo sapiens
  source 1..20: mol_type = genomic RNA
tggtggctctccttgtcatt

SEQ ID NO: 12796 - RNA, 20 nt, Homo sapiens
  source 1..20: mol_type = genomic RNA
ggtggctctccttgtcattt

SEQ ID NO: 12797 - RNA, 20 nt, Homo sapiens
  source 1..20: mol_type = genomic RNA
gtggctctccttgtcatttt

SEQ ID NO: 12798 - RNA, 20 nt, Homo sapiens
  source 1..20: mol_type = genomic RNA
tggctctccttgtcattttc

SEQ ID NO: 12799 - RNA, 20 nt, Homo sapiens
  source 1..20: mol_type = genomic RNA
ggctctccttgtcattttcc

SEQ ID NO: 12800 - RNA, 20 nt, Homo sapiens
  source 1..20: mol_type = genomic RNA
gctctccttgtcattttcca

SEQ ID NO: 12801 - RNA, 20 nt, Homo sapiens
  source 1..20: mol_type = genomic RNA
ctctccttgtcattttccag

SEQ ID NO: 12802 - RNA, 20 nt, Homo sapiens
  source 1..20: mol_type = genomic RNA
tctccttgtcattttccagg

SEQ ID NO: 12803 - RNA, 20 nt, Homo sapiens
  source 1..20: mol_type = genomic RNA
ctccttgtcattttccaggt

SEQ ID NO: 12804 - RNA, 20 nt, Homo sapiens
  source 1..20: mol_type = genomic RNA
tccttgtcattttccaggta

SEQ ID NO: 12805 - RNA, 20 nt, Homo sapiens
  source 1..20: mol_type = genomic RNA
ccttgtcattttccaggtat

SEQ ID NO: 12806 - RNA, 20 nt, Homo sapiens
  source 1..20: mol_type = genomic RNA
cttgtcattttccaggtatg

SEQ ID NO: 12807 - RNA, 20 nt, Homo sapiens
  source 1..20: mol_type = genomic RNA
ttgtcattttccaggtatgc

SEQ ID NO: 12808 - RNA, 20 nt, Homo sapiens
  source 1..20: mol_type = genomic RNA
tgtcattttccaggtatgcc

SEQ ID NO: 12809 - RNA, 20 nt, Homo sapiens
  source 1..20: mol_type = genomic RNA
gtcattttccaggtatgcct

SEQ ID NO: 12810 - RNA, 20 nt, Homo sapiens
  source 1..20: mol_type = genomic RNA
tcattttccaggtatgcctg

SEQ ID NO: 12811 - RNA, 20 nt, Homo sapiens
  source 1..20: mol_type = genomic RNA
cattttccaggtatgcctgt

SEQ ID NO: 12812 - RNA, 20 nt, Homo sapiens
  source 1..20: mol_type = genomic RNA
attttccaggtatgcctgtg

SEQ ID NO: 12813 - RNA, 20 nt, Homo sapiens
  source 1..20: mol_type = genomic RNA
ttttccaggtatgcctgtgt

SEQ ID NO: 12814 - RNA, 20 nt, Homo sapiens
  source 1..20: mol_type = genomic RNA
tttccaggtatgcctgtgtc

SEQ ID NO: 12815 - RNA, 20 nt, Homo sapiens
  source 1..20: mol_type = genomic RNA
ttccaggtatgcctgtgtca

SEQ ID NO: 12816 - RNA, 20 nt, Homo sapiens
  source 1..20: mol_type = genomic RNA
tccaggtatgcctgtgtcaa

SEQ ID NO: 12817 - RNA, 20 nt, Homo sapiens
  source 1..20: mol_type = genomic RNA
ccaggtatgcctgtgtcaag

SEQ ID NO: 12818 - RNA, 20 nt, Homo sapiens
  source 1..20: mol_type = genomic RNA
caggtatgcctgtgtcaaga

SEQ ID NO: 12819 - RNA, 20 nt, Homo sapiens
  source 1..20: mol_type = genomic RNA
aggtatgcctgtgtcaagat

SEQ ID NO: 12820 - RNA, 20 nt, Homo sapiens
  source 1..20: mol_type = genomic RNA
ggtatgcctgtgtcaagatg

SEQ ID NO: 12821 - RNA, 20 nt, Homo sapiens
  source 1..20: mol_type = genomic RNA
gtatgcctgtgtcaagatga

SEQ ID NO: 12822 - RNA, 20 nt, Homo sapiens
  source 1..20: mol_type = genomic RNA
tatgcctgtgtcaagatgag

SEQ ID NO: 12823 - RNA, 20 nt, Homo sapiens
  source 1..20: mol_type = genomic RNA
atgcctgtgtcaagatgagg

SEQ ID NO: 12824 - RNA, 20 nt, Homo sapiens
  source 1..20: mol_type = genomic RNA
tgcctgtgtcaagatgaggt

SEQ ID NO: 12825 - RNA, 20 nt, Homo sapiens
  source 1..20: mol_type = genomic RNA
gcctgtgtcaagatgaggtc

SEQ ID NO: 12826 - RNA, 20 nt, Homo sapiens
  source 1..20: mol_type = genomic RNA
cctgtgtcaagatgaggtca

SEQ ID NO: 12827 - RNA, 20 nt, Homo sapiens
  source 1..20: mol_type = genomic RNA
ctgtgtcaagatgaggtcac

SEQ ID NO: 12828 - RNA, 20 nt, Homo sapiens
  source 1..20: mol_type = genomic RNA
tgtgtcaagatgaggtcacg

SEQ ID NO: 12829 - RNA, 20 nt, Homo sapiens
  source 1..20: mol_type = genomic RNA
gtgtcaagatgaggtcacgg

SEQ ID NO: 12830 - RNA, 20 nt, Homo sapiens
  source 1..20: mol_type = genomic RNA
tgtcaagatgaggtcacgga

SEQ ID NO: 12831 - RNA, 20 nt, Homo sapiens
  source 1..20: mol_type = genomic RNA
gtcaagatgaggtcacggac

SEQ ID NO: 12832 - RNA, 20 nt, Homo sapiens
  source 1..20: mol_type = genomic RNA
tcaagatgaggtcacggacg

SEQ ID NO: 12833 - RNA, 20 nt, Homo sapiens
  source 1..20: mol_type = genomic RNA
caagatgaggtcacggacga

SEQ ID NO: 12834 - RNA, 20 nt, Homo sapiens
  source 1..20: mol_type = genomic RNA
aagatgaggtcacggacgat

SEQ ID NO: 12835 - RNA, 20 nt, Homo sapiens
  source 1..20: mol_type = genomic RNA
agatgaggtcacggacgatt

SEQ ID NO: 12836 - RNA, 20 nt, Homo sapiens
  source 1..20: mol_type = genomic RNA
gatgaggtcacggacgatta

SEQ ID NO: 12837 - RNA, 20 nt, Homo sapiens
  source 1..20: mol_type = genomic RNA
atgaggtcacggacgattac

SEQ ID NO: 12838 - RNA, 20 nt, Homo sapiens
  source 1..20: mol_type = genomic RNA
tgaggtcacggacgattaca

SEQ ID NO: 12839 - RNA, 20 nt, Homo sapiens
  source 1..20: mol_type = genomic RNA
gaggtcacggacgattacat

SEQ ID NO: 12840 - RNA, 20 nt, Homo sapiens
  source 1..20: mol_type = genomic RNA
aggtcacggacgattacatc

SEQ ID NO: 12841 - RNA, 20 nt, Homo sapiens
  source 1..20: mol_type = genomic RNA
ggtcacggacgattacatcg

SEQ ID NO: 12842 - RNA, 20 nt, Homo sapiens
  source 1..20: mol_type = genomic RNA
gtcacggacgattacatcgg

SEQ ID NO: 12843 - RNA, 20 nt, Homo sapiens
  source 1..20: mol_type = genomic RNA
tcacggacgattacatcgga

SEQ ID NO: 12844 - RNA, 20 nt, Homo sapiens
  source 1..20: mol_type = genomic RNA
cacggacgattacatcggag

SEQ ID NO: 12845 - RNA, 20 nt, Homo sapiens
  source 1..20: mol_type = genomic RNA
acggacgattacatcggaga

SEQ ID NO: 12846 - RNA, 20 nt, Homo sapiens
  source 1..20: mol_type = genomic RNA
cggacgattacatcggagac

SEQ ID NO: 12847 - RNA, 20 nt, Homo sapiens
  source 1..20: mol_type = genomic RNA
ggacgattacatcggagaca

SEQ ID NO: 12848 - RNA, 20 nt, Homo sapiens
  source 1..20: mol_type = genomic RNA
gacgattacatcggagacaa

SEQ ID NO: 12849 - RNA, 20 nt, Homo sapiens
  source 1..20: mol_type = genomic RNA
acgattacatcggagacaac

SEQ ID NO: 12850 - RNA, 20 nt, Homo sapiens
  source 1..20: mol_type = genomic RNA
cgattacatcggagacaaca

SEQ ID NO: 12851 - RNA, 20 nt, Homo sapiens
  source 1..20: mol_type = genomic RNA
gattacatcggagacaacac

SEQ ID NO: 12852 - RNA, 20 nt, Homo sapiens
  source 1..20: mol_type = genomic RNA
attacatcggagacaacacc

SEQ ID NO: 12853 - RNA, 20 nt, Homo sapiens
  source 1..20: mol_type = genomic RNA
ttacatcggagacaacacca

SEQ ID NO: 12854 - RNA, 20 nt, Homo sapiens
  source 1..20: mol_type = genomic RNA
tacatcggagacaacaccac

SEQ ID NO: 12855 - RNA, 20 nt, Homo sapiens
  source 1..20: mol_type = genomic RNA
acatcggagacaacaccaca

SEQ ID NO: 12856 - RNA, 20 nt, Homo sapiens
  source 1..20: mol_type = genomic RNA
catcggagacaacaccacag

SEQ ID NO: 12857 - RNA, 20 nt, Homo sapiens
  source 1..20: mol_type = genomic RNA
atcggagacaacaccacagt

SEQ ID NO: 12858 - RNA, 20 nt, Homo sapiens
  source 1..20: mol_type = genomic RNA
tcggagacaacaccacagtg

SEQ ID NO: 12859 - RNA, 20 nt, Homo sapiens
  source 1..20: mol_type = genomic RNA
cggagacaacaccacagtgg

SEQ ID NO: 12860 - RNA, 20 nt, Homo sapiens
  source 1..20: mol_type = genomic RNA
ggagacaacaccacagtgga

SEQ ID NO: 12861 - RNA, 20 nt, Homo sapiens
  source 1..20: mol_type = genomic RNA
gagacaacaccacagtggac

SEQ ID NO: 12862 - RNA, 20 nt, Homo sapiens
  source 1..20: mol_type = genomic RNA
agacaacaccacagtggact

SEQ ID NO: 12863 - RNA, 20 nt, Homo sapiens
  source 1..20: mol_type = genomic RNA
gacaacaccacagtggacta

SEQ ID NO: 12864 - RNA, 20 nt, Homo sapiens
  source 1..20: mol_type = genomic RNA
acaacaccacagtggactac

SEQ ID NO: 12865 - RNA, 20 nt, Homo sapiens
  source 1..20: mol_type = genomic RNA
caacaccacagtggactaca

SEQ ID NO: 12866 - RNA, 20 nt, Homo sapiens
  source 1..20: mol_type = genomic RNA
aacaccacagtggactacac

SEQ ID NO: 12867 - RNA, 20 nt, Homo sapiens
  source 1..20: mol_type = genomic RNA
acaccacagtggactacact

SEQ ID NO: 12868 - RNA, 20 nt, Homo sapiens
  source 1..20: mol_type = genomic RNA
caccacagtggactacactt

SEQ ID NO: 12869 - RNA, 20 nt, Homo sapiens
  source 1..20: mol_type = genomic RNA
accacagtggactacacttt

SEQ ID NO: 12870 - RNA, 20 nt, Homo sapiens
  source 1..20: mol_type = genomic RNA
ccacagtggactacactttg

SEQ ID NO: 12871 - RNA, 20 nt, Homo sapiens
  source 1..20: mol_type = genomic RNA
cacagtggactacactttgt

SEQ ID NO: 12872 - RNA, 20 nt, Homo sapiens
  source 1..20: mol_type = genomic RNA
acagtggactacactttgtt

SEQ ID NO: 12873 - RNA, 20 nt, Homo sapiens
  source 1..20: mol_type = genomic RNA
cagtggactacactttgttc

SEQ ID NO: 12874 - RNA, 20 nt, Homo sapiens
  source 1..20: mol_type = genomic RNA
agtggactacactttgttcg

SEQ ID NO: 12875 - RNA, 20 nt, Homo sapiens
  source 1..20: mol_type = genomic RNA
gtggactacactttgttcga

SEQ ID NO: 12876 - RNA, 20 nt, Homo sapiens
  source 1..20: mol_type = genomic RNA
tggactacactttgttcgag

SEQ ID NO: 12877 - RNA, 20 nt, Homo sapiens
  source 1..20: mol_type = genomic RNA
ggactacactttgttcgagt

SEQ ID NO: 12878 - RNA, 20 nt, Homo sapiens
  source 1..20: mol_type = genomic RNA
gactacactttgttcgagtc

SEQ ID NO: 12879 - RNA, 20 nt, Homo sapiens
  source 1..20: mol_type = genomic RNA
actacactttgttcgagtct

SEQ ID NO: 12880 - RNA, 20 nt, Homo sapiens
  source 1..20: mol_type = genomic RNA
ctacactttgttcgagtctt

SEQ ID NO: 12881 - RNA, 20 nt, Homo sapiens
  source 1..20: mol_type = genomic RNA
tacactttgttcgagtcttt

SEQ ID NO: 12882 - RNA, 20 nt, Homo sapiens
  source 1..20: mol_type = genomic RNA
acactttgttcgagtctttg

SEQ ID NO: 12883 - RNA, 20 nt, Homo sapiens
  source 1..20: mol_type = genomic RNA
cactttgttcgagtctttgt

SEQ ID NO: 12884 - RNA, 20 nt, Homo sapiens
  source 1..20: mol_type = genomic RNA
actttgttcgagtctttgtg

SEQ ID NO: 12885 - RNA, 20 nt, Homo sapiens
  source 1..20: mol_type = genomic RNA
ctttgttcgagtctttgtgc

SEQ ID NO: 12886 - RNA, 20 nt, Homo sapiens
  source 1..20: mol_type = genomic RNA
tttgttcgagtctttgtgct

SEQ ID NO: 12887 - RNA, 20 nt, Homo sapiens
  source 1..20: mol_type = genomic RNA
ttgttcgagtctttgtgctc

SEQ ID NO: 12888 - RNA, 20 nt, Homo sapiens
  source 1..20: mol_type = genomic RNA
tgttcgagtctttgtgctcc

SEQ ID NO: 12889 - RNA, 20 nt, Homo sapiens
  source 1..20: mol_type = genomic RNA
gttcgagtctttgtgctcca

SEQ ID NO: 12890 - RNA, 20 nt, Homo sapiens
  source 1..20: mol_type = genomic RNA
ttcgagtctttgtgctccaa

SEQ ID NO: 12891 - RNA, 20 nt, Homo sapiens
  source 1..20: mol_type = genomic RNA
tcgagtctttgtgctccaag

SEQ ID NO: 12892 - RNA, 20 nt, Homo sapiens
  source 1..20: mol_type = genomic RNA
cgagtctttgtgctccaaga

SEQ ID NO: 12893 - RNA, 20 nt, Homo sapiens
  source 1..20: mol_type = genomic RNA
gagtctttgtgctccaagaa

SEQ ID NO: 12894 - RNA, 20 nt, Homo sapiens
  source 1..20: mol_type = genomic RNA
agtctttgtgctccaagaag

SEQ ID NO: 12895 - RNA, 20 nt, Homo sapiens
  source 1..20: mol_type = genomic RNA
gtctttgtgctccaagaagg

SEQ ID NO: 12896 - RNA, 20 nt, Homo sapiens
  source 1..20: mol_type = genomic RNA
tctttgtgctccaagaagga

SEQ ID NO: 12897 - RNA, 20 nt, Homo sapiens
  source 1..20: mol_type = genomic RNA
ctttgtgctccaagaaggac

SEQ ID NO: 12898 - RNA, 20 nt, Homo sapiens
  source 1..20: mol_type = genomic RNA
tttgtgctccaagaaggacg

SEQ ID NO: 12899 - RNA, 20 nt, Homo sapiens
  source 1..20: mol_type = genomic RNA
ttgtgctccaagaaggacgt

SEQ ID NO: 12900 - RNA, 20 nt, Homo sapiens
  source 1..20: mol_type = genomic RNA
tgtgctccaagaaggacgtg

SEQ ID NO: 12901 - RNA, 20 nt, Homo sapiens
  source 1..20: mol_type = genomic RNA
gtgctccaagaaggacgtgc

SEQ ID NO: 12902 - RNA, 20 nt, Homo sapiens
  source 1..20: mol_type = genomic RNA
tgctccaagaaggacgtgcg

SEQ ID NO: 12903 - RNA, 20 nt, Homo sapiens
  source 1..20: mol_type = genomic RNA
gctccaagaaggacgtgcgg

SEQ ID NO: 12904 - RNA, 20 nt, Homo sapiens
  source 1..20: mol_type = genomic RNA
ctccaagaaggacgtgcgga

SEQ ID NO: 12905 - RNA, 20 nt, Homo sapiens
  source 1..20: mol_type = genomic RNA
tccaagaaggacgtgcggaa

SEQ ID NO: 12906 - RNA, 20 nt, Homo sapiens
  source 1..20: mol_type = genomic RNA
ccaagaaggacgtgcggaac

SEQ ID NO: 12907 - RNA, 20 nt, Homo sapiens
  source 1..20: mol_type = genomic RNA
caagaaggacgtgcggaact

SEQ ID NO: 12908 - RNA, 20 nt, Homo sapiens
  source 1..20: mol_type = genomic RNA
aagaaggacgtgcggaactt

SEQ ID NO: 12909 - RNA, 20 nt, Homo sapiens
  source 1..20: mol_type = genomic RNA
agaaggacgtgcggaacttt

SEQ ID NO: 12910 - RNA, 20 nt, Homo sapiens
  source 1..20: mol_type = genomic RNA
gaaggacgtgcggaacttta

SEQ ID NO: 12911 - RNA, 20 nt, Homo sapiens
  source 1..20: mol_type = genomic RNA
aaggacgtgcggaactttaa

SEQ ID NO: 12912 - RNA, 20 nt, Homo sapiens
  source 1..20: mol_type = genomic RNA
aggacgtgcggaactttaaa

SEQ ID NO: 12913 - RNA, 20 nt, Homo sapiens
  source 1..20: mol_type = genomic RNA
ggacgtgcggaactttaaag

SEQ ID NO: 12914 - RNA, 20 nt, Homo sapiens
  source 1..20: mol_type = genomic RNA
gacgtgcggaactttaaagc

SEQ ID NO: 12915 - RNA, 20 nt, Homo sapiens
  source 1..20: mol_type = genomic RNA
acgtgcggaactttaaagcc

SEQ ID NO: 12916 - RNA, 20 nt, Homo sapiens
  source 1..20: mol_type = genomic RNA
cgtgcggaactttaaagcct

SEQ ID NO: 12917 - RNA, 20 nt, Homo sapiens
  source 1..20: mol_type = genomic RNA
gtgcggaactttaaagcctg

SEQ ID NO: 12918 - RNA, 20 nt, Homo sapiens
  source 1..20: mol_type = genomic RNA
tgcggaactttaaagcctgg

SEQ ID NO: 12919 - RNA, 20 nt, Homo sapiens
  source 1..20: mol_type = genomic RNA
gcggaactttaaagcctggt

SEQ ID NO: 12920 - RNA, 20 nt, Homo sapiens
  source 1..20: mol_type = genomic RNA
cggaactttaaagcctggtt

SEQ ID NO: 12921 - RNA, 20 nt, Homo sapiens
  source 1..20: mol_type = genomic RNA
ggaactttaaagcctggttc

SEQ ID NO: 12922 - RNA, 20 nt, Homo sapiens
  source 1..20: mol_type = genomic RNA
gaactttaaagcctggttcc

SEQ ID NO: 12923 - RNA, 20 nt, Homo sapiens
  source 1..20: mol_type = genomic RNA
aactttaaagcctggttcct

SEQ ID NO: 12924 - RNA, 20 nt, Homo sapiens
  source 1..20: mol_type = genomic RNA
actttaaagcctggttcctc

SEQ ID NO: 12925 - RNA, 20 nt, Homo sapiens
  source 1..20: mol_type = genomic RNA
ctttaaagcctggttcctcc

SEQ ID NO: 12926 - RNA, 20 nt, Homo sapiens
  source 1..20: mol_type = genomic RNA
tttaaagcctggttcctccc

SEQ ID NO: 12927 - RNA, 20 nt, Homo sapiens
  source 1..20: mol_type = genomic RNA
ttaaagcctggttcctccct

SEQ ID NO: 12928 - RNA, 20 nt, Homo sapiens
  source 1..20: mol_type = genomic RNA
taaagcctggttcctcccta

SEQ ID NO: 12929 - RNA, 20 nt, Homo sapiens
  source 1..20: mol_type = genomic RNA
aaagcctggttcctccctat

SEQ ID NO: 12930 - RNA, 20 nt, Homo sapiens
  source 1..20: mol_type = genomic RNA
aagcctggttcctccctatc

SEQ ID NO: 12931 - RNA, 20 nt, Homo sapiens
  source 1..20: mol_type = genomic RNA
agcctggttcctccctatca

SEQ ID NO: 12932 - RNA, 20 nt, Homo sapiens
  source 1..20: mol_type = genomic RNA
gcctggttcctccctatcat

SEQ ID NO: 12933 - RNA, 20 nt, Homo sapiens
  source 1..20: mol_type = genomic RNA
cctggttcctccctatcatg

SEQ ID NO: 12934 - RNA, 20 nt, Homo sapiens
  source 1..20: mol_type = genomic RNA
ctggttcctccctatcatgt

SEQ ID NO: 12935 - RNA, 20 nt, Homo sapiens
  source 1..20: mol_type = genomic RNA
tggttcctccctatcatgta

SEQ ID NO: 12936 - RNA, 20 nt, Homo sapiens
  source 1..20: mol_type = genomic RNA
ggttcctccctatcatgtac

SEQ ID NO: 12937 - RNA, 20 nt, Homo sapiens
  source 1..20: mol_type = genomic RNA
gttcctccctatcatgtact

SEQ ID NO: 12938 - RNA, 20 nt, Homo sapiens
  source 1..20: mol_type = genomic RNA
ttcctccctatcatgtactc

SEQ ID NO: 12939 - RNA, 20 nt, Homo sapiens
  source 1..20: mol_type = genomic RNA
tcctccctatcatgtactcc

SEQ ID NO: 12940 - RNA, 20 nt, Homo sapiens
  source 1..20: mol_type = genomic RNA
cctccctatcatgtactcca

SEQ ID NO: 12941 - RNA, 20 nt, Homo sapiens
  source 1..20: mol_type = genomic RNA
ctccctatcatgtactccat

SEQ ID NO: 12942 - RNA, 20 nt, Homo sapiens
  source 1..20: mol_type = genomic RNA
tccctatcatgtactccatc

SEQ ID NO: 12943 - RNA, 20 nt, Homo sapiens
  source 1..20: mol_type = genomic RNA
ccctatcatgtactccatca

SEQ ID NO: 12944 - RNA, 20 nt, Homo sapiens
  source 1..20: mol_type = genomic RNA
cctatcatgtactccatcat

SEQ ID NO: 12945 - RNA, 20 nt, Homo sapiens
  source 1..20: mol_type = genomic RNA
ctatcatgtactccatcatt

SEQ ID NO: 12946 - RNA, 20 nt, Homo sapiens
  source 1..20: mol_type = genomic RNA
tatcatgtactccatcattt

SEQ ID NO: 12947 - RNA, 20 nt, Homo sapiens
  source 1..20: mol_type = genomic RNA
atcatgtactccatcatttg

SEQ ID NO: 12948 - RNA, 20 nt, Homo sapiens
  source 1..20: mol_type = genomic RNA
tcatgtactccatcatttgt

SEQ ID NO: 12949 - RNA, 20 nt, Homo sapiens
  source 1..20: mol_type = genomic RNA
catgtactccatcatttgtt

SEQ ID NO: 12950 - RNA, 20 nt, Homo sapiens
  source 1..20: mol_type = genomic RNA
atgtactccatcatttgttt

SEQ ID NO: 12951 - RNA, 20 nt, Homo sapiens
  source 1..20: mol_type = genomic RNA
tgtactccatcatttgtttc

SEQ ID NO: 12952 - RNA, 20 nt, Homo sapiens
  source 1..20: mol_type = genomic RNA
gtactccatcatttgtttcg

SEQ ID NO: 12953 - RNA, 20 nt, Homo sapiens
  source 1..20: mol_type = genomic RNA
tactccatcatttgtttcgt

SEQ ID NO: 12954 - RNA, 20 nt, Homo sapiens
  source 1..20: mol_type = genomic RNA
actccatcatttgtttcgtg

SEQ ID NO: 12955 - RNA, 20 nt, Homo sapiens
  source 1..20: mol_type = genomic RNA
ctccatcatttgtttcgtgg

SEQ ID NO: 12956 - RNA, 20 nt, Homo sapiens
  source 1..20: mol_type = genomic RNA
tccatcatttgtttcgtggg

SEQ ID NO: 12957 - RNA, 20 nt, Homo sapiens
  source 1..20: mol_type = genomic RNA
ccatcatttgtttcgtgggc

SEQ ID NO: 12958 - RNA, 20 nt, Homo sapiens
  source 1..20: mol_type = genomic RNA
catcatttgtttcgtgggcc

SEQ ID NO: 12959 - RNA, 20 nt, Homo sapiens
  source 1..20: mol_type = genomic RNA
atcatttgtttcgtgggcct

SEQ ID NO: 12960 - RNA, 20 nt, Homo sapiens
  source 1..20: mol_type = genomic RNA
tcatttgtttcgtgggccta

SEQ ID NO: 12961 - RNA, 20 nt, Homo sapiens
  source 1..20: mol_type = genomic RNA
catttgtttcgtgggcctac

SEQ ID NO: 12962 - RNA, 20 nt, Homo sapiens
  source 1..20: mol_type = genomic RNA
atttgtttcgtgggcctact

SEQ ID NO: 12963 - RNA, 20 nt, Homo sapiens
  source 1..20: mol_type = genomic RNA
tttgtttcgtgggcctactg

SEQ ID NO: 12964 - RNA, 20 nt, Homo sapiens
  source 1..20: mol_type = genomic RNA
ttgtttcgtgggcctactgg

SEQ ID NO: 12965 - RNA, 20 nt, Homo sapiens
  source 1..20: mol_type = genomic RNA
tgtttcgtgggcctactggg

SEQ ID NO: 12966 - RNA, 20 nt, Homo sapiens
  source 1..20: mol_type = genomic RNA
gtttcgtgggcctactgggc

SEQ ID NO: 12967 - RNA, 20 nt, Homo sapiens
  source 1..20: mol_type = genomic RNA
tttcgtgggcctactgggca

SEQ ID NO: 12968 - RNA, 20 nt, Homo sapiens
  source 1..20: mol_type = genomic RNA
ttcgtgggcctactgggcaa

SEQ ID NO: 12969 - RNA, 20 nt, Homo sapiens
  source 1..20: mol_type = genomic RNA
tcgtgggcctactgggcaat

SEQ ID NO: 12970 - RNA, 20 nt, Homo sapiens
  source 1..20: mol_type = genomic RNA
cgtgggcctactgggcaatg

SEQ ID NO: 12971 - RNA, 20 nt, Homo sapiens
  source 1..20: mol_type = genomic RNA
gtgggcctactgggcaatgg

SEQ ID NO: 12972 - RNA, 20 nt, Homo sapiens
  source 1..20: mol_type = genomic RNA
tgggcctactgggcaatggg

SEQ ID NO: 12973 - RNA, 20 nt, Homo sapiens
  source 1..20: mol_type = genomic RNA
gggcctactgggcaatgggc

SEQ ID NO: 12974 - RNA, 20 nt, Homo sapiens
  source 1..20: mol_type = genomic RNA
ggcctactgggcaatgggct

SEQ ID NO: 12975 - RNA, 20 nt, Homo sapiens
  source 1..20: mol_type = genomic RNA
gcctactgggcaatgggctg

SEQ ID NO: 12976 - RNA, 20 nt, Homo sapiens
  source 1..20: mol_type = genomic RNA
cctactgggcaatgggctgg

SEQ ID NO: 12977 - RNA, 20 nt, Homo sapiens
  source 1..20: mol_type = genomic RNA
ctactgggcaatgggctggt

SEQ ID NO: 12978 - RNA, 20 nt, Homo sapiens
  source 1..20: mol_type = genomic RNA
tactgggcaatgggctggtc

SEQ ID NO: 12979 - RNA, 20 nt, Homo sapiens
  source 1..20: mol_type = genomic RNA
actgggcaatgggctggtcg

SEQ ID NO: 12980 - RNA, 20 nt, Homo sapiens
  source 1..20: mol_type = genomic RNA
ctgggcaatgggctggtcgt

SEQ ID NO: 12981 - RNA, 20 nt, Homo sapiens
  source 1..20: mol_type = genomic RNA
tgggcaatgggctggtcgtg

SEQ ID NO: 12982 - RNA, 20 nt, Homo sapiens
  source 1..20: mol_type = genomic RNA
gggcaatgggctggtcgtgt

SEQ ID NO: 12983 - RNA, 20 nt, Homo sapiens
  source 1..20: mol_type = genomic RNA
ggcaatgggctggtcgtgtt

SEQ ID NO: 12984 - RNA, 20 nt, Homo sapiens
  source 1..20: mol_type = genomic RNA
gcaatgggctggtcgtgttg

SEQ ID NO: 12985 - RNA, 20 nt, Homo sapiens
  source 1..20: mol_type = genomic RNA
caatgggctggtcgtgttga

SEQ ID NO: 12986 - RNA, 20 nt, Homo sapiens
  source 1..20: mol_type = genomic RNA
aatgggctggtcgtgttgac

SEQ ID NO: 12987 - RNA, 20 nt, Homo sapiens
  source 1..20: mol_type = genomic RNA
atgggctggtcgtgttgacc

SEQ ID NO: 12988 - RNA, 20 nt, Homo sapiens
  source 1..20: mol_type = genomic RNA
tgggctggtcgtgttgacct

SEQ ID NO: 12989 - RNA, 20 nt, Homo sapiens
  source 1..20: mol_type = genomic RNA
gggctggtcgtgttgaccta

SEQ ID NO: 12990 - RNA, 20 nt, Homo sapiens
  source 1..20: mol_type = genomic RNA
ggctggtcgtgttgacctat

SEQ ID NO: 12991 - RNA, 20 nt, Homo sapiens
  source 1..20: mol_type = genomic RNA
gctggtcgtgttgacctata

SEQ ID NO: 12992 - RNA, 20 nt, Homo sapiens
  source 1..20: mol_type = genomic RNA
ctggtcgtgttgacctatat

SEQ ID NO: 12993 - RNA, 20 nt, Homo sapiens
  source 1..20: mol_type = genomic RNA
tggtcgtgttgacctatatc

SEQ ID NO: 12994 - RNA, 20 nt, Homo sapiens
  source 1..20: mol_type = genomic RNA
ggtcgtgttgacctatatct

SEQ ID NO: 12995 - RNA, 20 nt, Homo sapiens
  source 1..20: mol_type = genomic RNA
gtcgtgttgacctatatcta

SEQ ID NO: 12996 - RNA, 20 nt, Homo sapiens
  source 1..20: mol_type = genomic RNA
tcgtgttgacctatatctat

SEQ ID NO: 12997 - RNA, 20 nt, Homo sapiens
  source 1..20: mol_type = genomic RNA
cgtgttgacctatatctatt

SEQ ID NO: 12998 - RNA, 20 nt, Homo sapiens
  source 1..20: mol_type = genomic RNA
gtgttgacctatatctattt

SEQ ID NO: 12999 - RNA, 20 nt, Homo sapiens
  source 1..20: mol_type = genomic RNA
tgttgacctatatctatttc

SEQ ID NO: 13000 - RNA, 20 nt, Homo sapiens
  source 1..20: mol_type = genomic RNA
gttgacctatatctatttca

SEQ ID NO: 13001 - RNA, 20 nt, Homo sapiens
  source 1..20: mol_type = genomic RNA
ttgacctatatctatttcaa

SEQ ID NO: 13002 - RNA, 20 nt, Homo sapiens
  source 1..20: mol_type = genomic RNA
tgacctatatctatttcaag

SEQ ID NO: 13003 - RNA, 20 nt, Homo sapiens
  source 1..20: mol_type = genomic RNA
gacctatatctatttcaaga

SEQ ID NO: 13004 - RNA, 20 nt, Homo sapiens
  source 1..20: mol_type = genomic RNA
acctatatctatttcaagag

SEQ ID NO: 13005 - RNA, 20 nt, Homo sapiens
  source 1..20: mol_type = genomic RNA
cctatatctatttcaagagg

SEQ ID NO: 13006 - RNA, 20 nt, Homo sapiens
  source 1..20: mol_type = genomic RNA
ctatatctatttcaagaggc

SEQ ID NO: 13007 - RNA, 20 nt, Homo sapiens
  source 1..20: mol_type = genomic RNA
tatatctatttcaagaggct

SEQ ID NO: 13008 - RNA, 20 nt, Homo sapiens
  source 1..20: mol_type = genomic RNA
atatctatttcaagaggctc

SEQ ID NO: 13009 - RNA, 20 nt, Homo sapiens
  source 1..20: mol_type = genomic RNA
tatctatttcaagaggctca

SEQ ID NO: 13010 - RNA, 20 nt, Homo sapiens
  source 1..20: mol_type = genomic RNA
atctatttcaagaggctcaa

SEQ ID NO: 13011 - RNA, 20 nt, Homo sapiens
  source 1..20: mol_type = genomic RNA
tctatttcaagaggctcaag

SEQ ID NO: 13012 - RNA, 20 nt, Homo sapiens
  source 1..20: mol_type = genomic RNA
ctatttcaagaggctcaaga

SEQ ID NO: 13013 - RNA, 20 nt, Homo sapiens
  source 1..20: mol_type = genomic RNA
tatttcaagaggctcaagac

SEQ ID NO: 13014 - RNA, 20 nt, Homo sapiens
  source 1..20: mol_type = genomic RNA
atttcaagaggctcaagacc

SEQ ID NO: 13015 - RNA, 20 nt, Homo sapiens
  source 1..20: mol_type = genomic RNA
tttcaagaggctcaagacca

SEQ ID NO: 13016 - RNA, 20 nt, Homo sapiens
  source 1..20: mol_type = genomic RNA
ttcaagaggctcaagaccat

SEQ ID NO: 13017 - RNA, 20 nt, Homo sapiens
  source 1..20: mol_type = genomic RNA
tcaagaggctcaagaccatg

SEQ ID NO: 13018 - RNA, 20 nt, Homo sapiens
  source 1..20: mol_type = genomic RNA
caagaggctcaagaccatga

SEQ ID NO: 13019 - RNA, 20 nt, Homo sapiens
  source 1..20: mol_type = genomic RNA
aagaggctcaagaccatgac

SEQ ID NO: 13020 - RNA, 20 nt, Homo sapiens
  source 1..20: mol_type = genomic RNA
agaggctcaagaccatgacc

SEQ ID NO: 13021 - RNA, 20 nt, Homo sapiens
  source 1..20: mol_type = genomic RNA
gaggctcaagaccatgaccg

SEQ ID NO: 13022 - RNA, 20 nt, Homo sapiens
  source 1..20: mol_type = genomic RNA
aggctcaagaccatgaccga

SEQ ID NO: 13023 - RNA, 20 nt, Homo sapiens
  source 1..20: mol_type = genomic RNA
ggctcaagaccatgaccgat

SEQ ID NO: 13024 - RNA, 20 nt, Homo sapiens
  source 1..20: mol_type = genomic RNA
gctcaagaccatgaccgata

SEQ ID NO: 13025 - RNA, 20 nt, Homo sapiens
  source 1..20: mol_type = genomic RNA
ctcaagaccatgaccgatac

SEQ ID NO: 13026 - RNA, 20 nt, Homo sapiens
  source 1..20: mol_type = genomic RNA
tcaagaccatgaccgatacc

SEQ ID NO: 13027 - RNA, 20 nt, Homo sapiens
  source 1..20: mol_type = genomic RNA
caagaccatgaccgatacct

SEQ ID NO: 13028 - RNA, 20 nt, Homo sapiens
  source 1..20: mol_type = genomic RNA
aagaccatgaccgataccta

SEQ ID NO: 13029 - RNA, 20 nt, Homo sapiens
  source 1..20: mol_type = genomic RNA
agaccatgaccgatacctac

SEQ ID NO: 13030 - RNA, 20 nt, Homo sapiens
  source 1..20: mol_type = genomic RNA
gaccatgaccgatacctacc

SEQ ID NO: 13031 - RNA, 20 nt, Homo sapiens
  source 1..20: mol_type = genomic RNA
accatgaccgatacctacct

SEQ ID NO: 13032 - RNA, 20 nt, Homo sapiens
  source 1..20: mol_type = genomic RNA
ccatgaccgatacctacctg

SEQ ID NO: 13033 - RNA, 20 nt, Homo sapiens
  source 1..20: mol_type = genomic RNA
catgaccgatacctacctgc

SEQ ID NO: 13034 - RNA, 20 nt, Homo sapiens
  source 1..20: mol_type = genomic RNA
atgaccgatacctacctgct

SEQ ID NO: 13035 - RNA, 20 nt, Homo sapiens
  source 1..20: mol_type = genomic RNA
tgaccgatacctacctgctc

SEQ ID NO: 13036 - RNA, 20 nt, Homo sapiens
  source 1..20: mol_type = genomic RNA
gaccgatacctacctgctca

SEQ ID NO: 13037 - RNA, 20 nt, Homo sapiens
  source 1..20: mol_type = genomic RNA
accgatacctacctgctcaa

SEQ ID NO: 13038 - RNA, 20 nt, Homo sapiens
  source 1..20: mol_type = genomic RNA
ccgatacctacctgctcaac

SEQ ID NO: 13039 - RNA, 20 nt, Homo sapiens
  source 1..20: mol_type = genomic RNA
cgatacctacctgctcaacc

SEQ ID NO: 13040 - RNA, 20 nt, Homo sapiens
  source 1..20: mol_type = genomic RNA
gatacctacctgctcaacct

SEQ ID NO: 13041 - RNA, 20 nt, Homo sapiens
  source 1..20: mol_type = genomic RNA
atacctacctgctcaacctg

SEQ ID NO: 13042 - RNA, 20 nt, Homo sapiens
  source 1..20: mol_type = genomic RNA
tacctacctgctcaacctgg

SEQ ID NO: 13043 - RNA, 20 nt, Homo sapiens
  source 1..20: mol_type = genomic RNA
acctacctgctcaacctggc

SEQ ID NO: 13044 - RNA, 20 nt, Homo sapiens
  source 1..20: mol_type = genomic RNA
cctacctgctcaacctggcg

SEQ ID NO: 13045 - RNA, 20 nt, Homo sapiens
  source 1..20: mol_type = genomic RNA
ctacctgctcaacctggcgg

SEQ ID NO: 13046 - RNA, 20 nt, Homo sapiens
  source 1..20: mol_type = genomic RNA
tacctgctcaacctggcggt

SEQ ID NO: 13047 - RNA, 20 nt, Homo sapiens
  source 1..20: mol_type = genomic RNA
acctgctcaacctggcggtg

SEQ ID NO: 13048 - RNA, 20 nt, Homo sapiens
  source 1..20: mol_type = genomic RNA
cctgctcaacctggcggtgg

SEQ ID NO: 13049 - RNA, 20 nt, Homo sapiens
  source 1..20: mol_type = genomic RNA
ctgctcaacctggcggtggc

SEQ ID NO: 13050 - RNA, 20 nt, Homo sapiens
  source 1..20: mol_type = genomic RNA
tgctcaacctggcggtggca

SEQ ID NO: 13051 - RNA, 20 nt, Homo sapiens
  source 1..20: mol_type = genomic RNA
gctcaacctggcggtggcag

SEQ ID NO: 13052 - RNA, 20 nt, Homo sapiens
  source 1..20: mol_type = genomic RNA
ctcaacctggcggtggcaga

SEQ ID NO: 13053 - RNA, 20 nt, Homo sapiens
  source 1..20: mol_type = genomic RNA
tcaacctggcggtggcagac

SEQ ID NO: 13054 - RNA, 20 nt, Homo sapiens
  source 1..20: mol_type = genomic RNA
caacctggcggtggcagaca

SEQ ID NO: 13055 - RNA, 20 nt, Homo sapiens
  source 1..20: mol_type = genomic RNA
aacctggcggtggcagacat

SEQ ID NO: 13056 - RNA, 20 nt, Homo sapiens
  source 1..20: mol_type = genomic RNA
acctggcggtggcagacatc

SEQ ID NO: 13057 - RNA, 20 nt, Homo sapiens
  source 1..20: mol_type = genomic RNA
cctggcggtggcagacatcc

SEQ ID NO: 13058 - RNA, 20 nt, Homo sapiens
  source 1..20: mol_type = genomic RNA
ctggcggtggcagacatcct

SEQ ID NO: 13059 - RNA, 20 nt, Homo sapiens
  source 1..20: mol_type = genomic RNA
tggcggtggcagacatcctc

SEQ ID NO: 13060 - RNA, 20 nt, Homo sapiens
  source 1..20: mol_type = genomic RNA
ggcggtggcagacatcctct

SEQ ID NO: 13061 - RNA, 20 nt, Homo sapiens
  source 1..20: mol_type = genomic RNA
gcggtggcagacatcctctt

SEQ ID NO: 13062 - RNA, 20 nt, Homo sapiens
  source 1..20: mol_type = genomic RNA
cggtggcagacatcctcttc

SEQ ID NO: 13063 - RNA, 20 nt, Homo sapiens
  source 1..20: mol_type = genomic RNA
ggtggcagacatcctcttcc

SEQ ID NO: 13064 - RNA, 20 nt, Homo sapiens
  source 1..20: mol_type = genomic RNA
gtggcagacatcctcttcct

SEQ ID NO: 13065 - RNA, 20 nt, Homo sapiens
  source 1..20: mol_type = genomic RNA
tggcagacatcctcttcctc

SEQ ID NO: 13066 - RNA, 20 nt, Homo sapiens
  source 1..20: mol_type = genomic RNA
ggcagacatcctcttcctcc

SEQ ID NO: 13067 - RNA, 20 nt, Homo sapiens
  source 1..20: mol_type = genomic RNA
gcagacatcctcttcctcct

SEQ ID NO: 13068 - RNA, 20 nt, Homo sapiens
  source 1..20: mol_type = genomic RNA
cagacatcctcttcctcctg

SEQ ID NO: 13069 - RNA, 20 nt, Homo sapiens
  source 1..20: mol_type = genomic RNA
agacatcctcttcctcctga

SEQ ID NO: 13070 - RNA, 20 nt, Homo sapiens
  source 1..20: mol_type = genomic RNA
gacatcctcttcctcctgac

SEQ ID NO: 13071 - RNA, 20 nt, Homo sapiens
  source 1..20: mol_type = genomic RNA
acatcctcttcctcctgacc

SEQ ID NO: 13072 - RNA, 20 nt, Homo sapiens
  source 1..20: mol_type = genomic RNA
catcctcttcctcctgaccc

SEQ ID NO: 13073 - RNA, 20 nt, Homo sapiens
  source 1..20: mol_type = genomic RNA
atcctcttcctcctgaccct

SEQ ID NO: 13074 - RNA, 20 nt, Homo sapiens
  source 1..20: mol_type = genomic RNA
tcctcttcctcctgaccctt

SEQ ID NO: 13075 - RNA, 20 nt, Homo sapiens
  source 1..20: mol_type = genomic RNA
cctcttcctcctgacccttc

SEQ ID NO: 13076 - RNA, 20 nt, Homo sapiens
  source 1..20: mol_type = genomic RNA
ctcttcctcctgacccttcc

SEQ ID NO: 13077 - RNA, 20 nt, Homo sapiens
  source 1..20: mol_type = genomic RNA
tcttcctcctgacccttccc

SEQ ID NO: 13078 - RNA, 20 nt, Homo sapiens
  source 1..20: mol_type = genomic RNA
cttcctcctgacccttccct

SEQ ID NO: 13079 - RNA, 20 nt, Homo sapiens
  source 1..20: mol_type = genomic RNA
ttcctcctgacccttccctt

SEQ ID NO: 13080 - RNA, 20 nt, Homo sapiens
  source 1..20: mol_type = genomic RNA
tcctcctgacccttcccttc

SEQ ID NO: 13081 - RNA, 20 nt, Homo sapiens
  source 1..20: mol_type = genomic RNA
cctcctgacccttcccttct

SEQ ID NO: 13082 - RNA, 20 nt, Homo sapiens
  source 1..20: mol_type = genomic RNA
ctcctgacccttcccttctg

SEQ ID NO: 13083 - RNA, 20 nt, Homo sapiens
  source 1..20: mol_type = genomic RNA
tcctgacccttcccttctgg

SEQ ID NO: 13084 - RNA, 20 nt, Homo sapiens
  source 1..20: mol_type = genomic RNA
cctgacccttcccttctggg

SEQ ID NO: 13085 - RNA, 20 nt, Homo sapiens
  source 1..20: mol_type = genomic RNA
ctgacccttcccttctgggc

SEQ ID NO: 13086 - RNA, 20 nt, Homo sapiens
  source 1..20: mol_type = genomic RNA
tgacccttcccttctgggcc

SEQ ID NO: 13087 - RNA, 20 nt, Homo sapiens
  source 1..20: mol_type = genomic RNA
gacccttcccttctgggcct

SEQ ID NO: 13088 - RNA, 20 nt, Homo sapiens
  source 1..20: mol_type = genomic RNA
acccttcccttctgggccta

SEQ ID NO: 13089 - RNA, 20 nt, Homo sapiens
  source 1..20: mol_type = genomic RNA
cccttcccttctgggcctac

SEQ ID NO: 13090 - RNA, 20 nt, Homo sapiens
  source 1..20: mol_type = genomic RNA
ccttcccttctgggcctaca

SEQ ID NO: 13091 - RNA, 20 nt, Homo sapiens
  source 1..20: mol_type = genomic RNA
cttcccttctgggcctacag

SEQ ID NO: 13092 - RNA, 20 nt, Homo sapiens
  source 1..20: mol_type = genomic RNA
ttcccttctgggcctacagc

SEQ ID NO: 13093 - RNA, 20 nt, Homo sapiens
  source 1..20: mol_type = genomic RNA
tcccttctgggcctacagcg

SEQ ID NO: 13094 - RNA, 20 nt, Homo sapiens
  source 1..20: mol_type = genomic RNA
cccttctgggcctacagcgc

SEQ ID NO: 13095 - RNA, 20 nt, Homo sapiens
  source 1..20: mol_type = genomic RNA
ccttctgggcctacagcgcg

SEQ ID NO: 13096 - RNA, 20 nt, Homo sapiens
  source 1..20: mol_type = genomic RNA
cttctgggcctacagcgcgg

SEQ ID NO: 13097 - RNA, 20 nt, Homo sapiens
  source 1..20: mol_type = genomic RNA
ttctgggcctacagcgcggc

SEQ ID NO: 13098 - RNA, 20 nt, Homo sapiens
  source 1..20: mol_type = genomic RNA
tctgggcctacagcgcggcc

SEQ ID NO: 13099 - RNA, 20 nt, Homo sapiens
  source 1..20: mol_type = genomic RNA
ctgggcctacagcgcggcca

SEQ ID NO: 13100 - RNA, 20 nt, Homo sapiens
  source 1..20: mol_type = genomic RNA
tgggcctacagcgcggccaa

SEQ ID NO: 13101 - RNA, 20 nt, Homo sapiens
  source 1..20: mol_type = genomic RNA
gggcctacagcgcggccaag

SEQ ID NO: 13102 - RNA, 20 nt, Homo sapiens
  source 1..20: mol_type = genomic RNA
ggcctacagcgcggccaagt

SEQ ID NO: 13103 - RNA, 20 nt, Homo sapiens
  source 1..20: mol_type = genomic RNA
gcctacagcgcggccaagtc

SEQ ID NO: 13104 - RNA, 20 nt, Homo sapiens
  source 1..20: mol_type = genomic RNA
cctacagcgcggccaagtcc

SEQ ID NO: 13105 - RNA, 20 nt, Homo sapiens
  source 1..20: mol_type = genomic RNA
ctacagcgcggccaagtcct

SEQ ID NO: 13106 - RNA, 20 nt, Homo sapiens
  source 1..20: mol_type = genomic RNA
tacagcgcggccaagtcctg

SEQ ID NO: 13107 - RNA, 20 nt, Homo sapiens
  source 1..20: mol_type = genomic RNA
acagcgcggccaagtcctgg

SEQ ID NO: 13108 - RNA, 20 nt, Homo sapiens
  source 1..20: mol_type = genomic RNA
cagcgcggccaagtcctggg

SEQ ID NO: 13109 - RNA, 20 nt, Homo sapiens
  source 1..20: mol_type = genomic RNA
agcgcggccaagtcctgggt

SEQ ID NO: 13110 - RNA, 20 nt, Homo sapiens
  source 1..20: mol_type = genomic RNA
gcgcggccaagtcctgggtc

SEQ ID NO: 13111 - RNA, 20 nt, Homo sapiens
  source 1..20: mol_type = genomic RNA
cgcggccaagtcctgggtct

SEQ ID NO: 13112 - RNA, 20 nt, Homo sapiens
  source 1..20: mol_type = genomic RNA
gcggccaagtcctgggtctt

SEQ ID NO: 13113 - RNA, 20 nt, Homo sapiens
  source 1..20: mol_type = genomic RNA
cggccaagtcctgggtcttc

SEQ ID NO: 13114 - RNA, 20 nt, Homo sapiens
  source 1..20: mol_type = genomic RNA
ggccaagtcctgggtcttcg

SEQ ID NO: 13115 - RNA, 20 nt, Homo sapiens
  source 1..20: mol_type = genomic RNA
gccaagtcctgggtcttcgg

SEQ ID NO: 13116 - RNA, 20 nt, Homo sapiens
  source 1..20: mol_type = genomic RNA
ccaagtcctgggtcttcggt

SEQ ID NO: 13117 - RNA, 20 nt, Homo sapiens
  source 1..20: mol_type = genomic RNA
caagtcctgggtcttcggtg

SEQ ID NO: 13118 - RNA, 20 nt, Homo sapiens
  source 1..20: mol_type = genomic RNA
aagtcctgggtcttcggtgt

SEQ ID NO: 13119 - RNA, 20 nt, Homo sapiens
  source 1..20: mol_type = genomic RNA
agtcctgggtcttcggtgtc

SEQ ID NO: 13120 - RNA, 20 nt, Homo sapiens
  source 1..20: mol_type = genomic RNA
gtcctgggtcttcggtgtcc

SEQ ID NO: 13121 - RNA, 20 nt, Homo sapiens
  source 1..20: mol_type = genomic RNA
tcctgggtcttcggtgtcca

SEQ ID NO: 13122 - RNA, 20 nt, Homo sapiens
  source 1..20: mol_type = genomic RNA
cctgggtcttcggtgtccac

SEQ ID NO: 13123 - RNA, 20 nt, Homo sapiens
  source 1..20: mol_type = genomic RNA
ctgggtcttcggtgtccact

SEQ ID NO: 13124 - RNA, 20 nt, Homo sapiens
  source 1..20: mol_type = genomic RNA
tgggtcttcggtgtccactt

SEQ ID NO: 13125 - RNA, 20 nt, Homo sapiens
  source 1..20: mol_type = genomic RNA
gggtcttcggtgtccacttt

SEQ ID NO: 13126 - RNA, 20 nt, Homo sapiens
  source 1..20: mol_type = genomic RNA
ggtcttcggtgtccactttt

SEQ ID NO: 13127 - RNA, 20 nt, Homo sapiens
  source 1..20: mol_type = genomic RNA
gtcttcggtgtccacttttg

SEQ ID NO: 13128 - RNA, 20 nt, Homo sapiens
  source 1..20: mol_type = genomic RNA
tcttcggtgtccacttttgc

SEQ ID NO: 13129 - RNA, 20 nt, Homo sapiens
  source 1..20: mol_type = genomic RNA
cttcggtgtccacttttgca

SEQ ID NO: 13130 - RNA, 20 nt, Homo sapiens
  source 1..20: mol_type = genomic RNA
ttcggtgtccacttttgcaa

SEQ ID NO: 13131 - RNA, 20 nt, Homo sapiens
  source 1..20: mol_type = genomic RNA
tcggtgtccacttttgcaag

SEQ ID NO: 13132 - RNA, 20 nt, Homo sapiens
  source 1..20: mol_type = genomic RNA
cggtgtccacttttgcaagc

SEQ ID NO: 13133 - RNA, 20 nt, Homo sapiens
  source 1..20: mol_type = genomic RNA
ggtgtccacttttgcaagct

SEQ ID NO: 13134 - RNA, 20 nt, Homo sapiens
  source 1..20: mol_type = genomic RNA
gtgtccacttttgcaagctc

SEQ ID NO: 13135 - RNA, 20 nt, Homo sapiens
  source 1..20: mol_type = genomic RNA
tgtccacttttgcaagctca

SEQ ID NO: 13136 - RNA, 20 nt, Homo sapiens
  source 1..20: mol_type = genomic RNA
gtccacttttgcaagctcat

SEQ ID NO: 13137 - RNA, 20 nt, Homo sapiens
  source 1..20: mol_type = genomic RNA
tccacttttgcaagctcatc

SEQ ID NO: 13138 - RNA, 20 nt, Homo sapiens
  source 1..20: mol_type = genomic RNA
ccacttttgcaagctcatct

SEQ ID NO: 13139 - RNA, 20 nt, Homo sapiens
  source 1..20: mol_type = genomic RNA
cacttttgcaagctcatctt

SEQ ID NO: 13140 - RNA, 20 nt, Homo sapiens
  source 1..20: mol_type = genomic RNA
acttttgcaagctcatcttt

SEQ ID NO: 13141 - RNA, 20 nt, Homo sapiens
  source 1..20: mol_type = genomic RNA
cttttgcaagctcatctttg

SEQ ID NO: 13142 - RNA, 20 nt, Homo sapiens
  source 1..20: mol_type = genomic RNA
ttttgcaagctcatctttgc

SEQ ID NO: 13143 - RNA, 20 nt, Homo sapiens
  source 1..20: mol_type = genomic RNA
tttgcaagctcatctttgcc

SEQ ID NO: 13144 - RNA, 20 nt, Homo sapiens
  source 1..20: mol_type = genomic RNA
ttgcaagctcatctttgcca

SEQ ID NO: 13145 - RNA, 20 nt, Homo sapiens
  source 1..20: mol_type = genomic RNA
tgcaagctcatctttgccat

SEQ ID NO: 13146 - RNA, 20 nt, Homo sapiens
  source 1..20: mol_type = genomic RNA
gcaagctcatctttgccatc

SEQ ID NO: 13147 - RNA, 20 nt, Homo sapiens
  source 1..20: mol_type = genomic RNA
caagctcatctttgccatct

SEQ ID NO: 13148 - RNA, 20 nt, Homo sapiens
  source 1..20: mol_type = genomic RNA
aagctcatctttgccatcta

SEQ ID NO: 13149 - RNA, 20 nt, Homo sapiens
  source 1..20: mol_type = genomic RNA
agctcatctttgccatctac

SEQ ID NO: 13150 - RNA, 20 nt, Homo sapiens
  source 1..20: mol_type = genomic RNA
gctcatctttgccatctaca

SEQ ID NO: 13151 - RNA, 20 nt, Homo sapiens
  source 1..20: mol_type = genomic RNA
ctcatctttgccatctacaa

SEQ ID NO: 13152 - RNA, 20 nt, Homo sapiens
  source 1..20: mol_type = genomic RNA
tcatctttgccatctacaag

SEQ ID NO: 13153 - RNA, 20 nt, Homo sapiens
  source 1..20: mol_type = genomic RNA
catctttgccatctacaaga

SEQ ID NO: 13154 - RNA, 20 nt, Homo sapiens
  source 1..20: mol_type = genomic RNA
atctttgccatctacaagat

SEQ ID NO: 13155 - RNA, 20 nt, Homo sapiens
  source 1..20: mol_type = genomic RNA
tctttgccatctacaagatg

SEQ ID NO: 13156 - RNA, 20 nt, Homo sapiens
  source 1..20: mol_type = genomic RNA
ctttgccatctacaagatga

SEQ ID NO: 13157 - RNA, 20 nt, Homo sapiens
  source 1..20: mol_type = genomic RNA
tttgccatctacaagatgag

SEQ ID NO: 13158 - RNA, 20 nt, Homo sapiens
  source 1..20: mol_type = genomic RNA
ttgccatctacaagatgagc

SEQ ID NO: 13159 - RNA, 20 nt, Homo sapiens
  source 1..20: mol_type = genomic RNA
tgccatctacaagatgagct

SEQ ID NO: 13160 - RNA, 20 nt, Homo sapiens
  source 1..20: mol_type = genomic RNA
gccatctacaagatgagctt

SEQ ID NO: 13161 - RNA, 20 nt, Homo sapiens
  source 1..20: mol_type = genomic RNA
ccatctacaagatgagcttc

SEQ ID NO: 13162 - RNA, 20 nt, Homo sapiens
  source 1..20: mol_type = genomic RNA
catctacaagatgagcttct

SEQ ID NO: 13163 - RNA, 20 nt, Homo sapiens
  source 1..20: mol_type = genomic RNA
atctacaagatgagcttctt

SEQ ID NO: 13164 - RNA, 20 nt, Homo sapiens
  source 1..20: mol_type = genomic RNA
tctacaagatgagcttcttc

SEQ ID NO: 13165 - RNA, 20 nt, Homo sapiens
  source 1..20: mol_type = genomic RNA
ctacaagatgagcttcttca

SEQ ID NO: 13166 - RNA, 20 nt, Homo sapiens
  source 1..20: mol_type = genomic RNA
tacaagatgagcttcttcag

SEQ ID NO: 13167 - RNA, 20 nt, Homo sapiens
  source 1..20: mol_type = genomic RNA
acaagatgagcttcttcagt

SEQ ID NO: 13168 - RNA, 20 nt, Homo sapiens
  source 1..20: mol_type = genomic RNA
caagatgagcttcttcagtg

SEQ ID NO: 13169 - RNA, 20 nt, Homo sapiens
  source 1..20: mol_type = genomic RNA
aagatgagcttcttcagtgg

SEQ ID NO: 13170 - RNA, 20 nt, Homo sapiens
  source 1..20: mol_type = genomic RNA
agatgagcttcttcagtggc

SEQ ID NO: 13171 - RNA, 20 nt, Homo sapiens
  source 1..20: mol_type = genomic RNA
gatgagcttcttcagtggca

SEQ ID NO: 13172 - RNA, 20 nt, Homo sapiens
  source 1..20: mol_type = genomic RNA
atgagcttcttcagtggcat

SEQ ID NO: 13173 - RNA, 20 nt, Homo sapiens
  source 1..20: mol_type = genomic RNA
tgagcttcttcagtggcatg

SEQ ID NO: 13174 - RNA, 20 nt, Homo sapiens
  source 1..20: mol_type = genomic RNA
gagcttcttcagtggcatgc

SEQ ID NO: 13175 - RNA, 20 nt, Homo sapiens
  source 1..20: mol_type = genomic RNA
agcttcttcagtggcatgct

SEQ ID NO: 13176 - RNA, 20 nt, Homo sapiens
  source 1..20: mol_type = genomic RNA
gcttcttcagtggcatgctc

SEQ ID NO: 13177 - RNA, 20 nt, Homo sapiens
  source 1..20: mol_type = genomic RNA
cttcttcagtggcatgctcc

SEQ ID NO: 13178 - RNA, 20 nt, Homo sapiens
  source 1..20: mol_type = genomic RNA
ttcttcagtggcatgctcct

SEQ ID NO: 13179 - RNA, 20 nt, Homo sapiens
  source 1..20: mol_type = genomic RNA
tcttcagtggcatgctccta

SEQ ID NO: 13180 - RNA, 20 nt, Homo sapiens
  source 1..20: mol_type = genomic RNA
cttcagtggcatgctcctac

SEQ ID NO: 13181 - RNA, 20 nt, Homo sapiens
  source 1..20: mol_type = genomic RNA
ttcagtggcatgctcctact

SEQ ID NO: 13182 - RNA, 20 nt, Homo sapiens
  source 1..20: mol_type = genomic RNA
tcagtggcatgctcctactt

SEQ ID NO: 13183 - RNA, 20 nt, Homo sapiens
  source 1..20: mol_type = genomic RNA
cagtggcatgctcctacttc

SEQ ID NO: 13184 - RNA, 20 nt, Homo sapiens
  source 1..20: mol_type = genomic RNA
agtggcatgctcctacttct

SEQ ID NO: 13185 - RNA, 20 nt, Homo sapiens
  source 1..20: mol_type = genomic RNA
gtggcatgctcctacttctt

SEQ ID NO: 13186 - RNA, 20 nt, Homo sapiens
  source 1..20: mol_type = genomic RNA
tggcatgctcctacttcttt

SEQ ID NO: 13187 - RNA, 20 nt, Homo sapiens
  source 1..20: mol_type = genomic RNA
ggcatgctcctacttctttg

SEQ ID NO: 13188 - RNA, 20 nt, Homo sapiens
  source 1..20: mol_type = genomic RNA
gcatgctcctacttctttgc

SEQ ID NO: 13189 - RNA, 20 nt, Homo sapiens
  source 1..20: mol_type = genomic RNA
catgctcctacttctttgca

SEQ ID NO: 13190 - RNA, 20 nt, Homo sapiens
  source 1..20: mol_type = genomic RNA
atgctcctacttctttgcat

SEQ ID NO: 13191 - RNA, 20 nt, Homo sapiens
  source 1..20: mol_type = genomic RNA
tgctcctacttctttgcatc

SEQ ID NO: 13192 - RNA, 20 nt, Homo sapiens
  source 1..20: mol_type = genomic RNA
gctcctacttctttgcatca

SEQ ID NO: 13193 - RNA, 20 nt, Homo sapiens
  source 1..20: mol_type = genomic RNA
ctcctacttctttgcatcag

SEQ ID NO: 13194 - RNA, 20 nt, Homo sapiens
  source 1..20: mol_type = genomic RNA
tcctacttctttgcatcagc

SEQ ID NO: 13195 - RNA, 20 nt, Homo sapiens
  source 1..20: mol_type = genomic RNA
cctacttctttgcatcagca

SEQ ID NO: 13196 - RNA, 20 nt, Homo sapiens
  source 1..20: mol_type = genomic RNA
ctacttctttgcatcagcat

SEQ ID NO: 13197 - RNA, 20 nt, Homo sapiens
  source 1..20: mol_type = genomic RNA
tacttctttgcatcagcatt

SEQ ID NO: 13198 - RNA, 20 nt, Homo sapiens
  source 1..20: mol_type = genomic RNA
acttctttgcatcagcattg

SEQ ID NO: 13199 - RNA, 20 nt, Homo sapiens
  source 1..20: mol_type = genomic RNA
cttctttgcatcagcattga

SEQ ID NO: 13200 - RNA, 20 nt, Homo sapiens
  source 1..20: mol_type = genomic RNA
ttctttgcatcagcattgac

SEQ ID NO: 13201 - RNA, 20 nt, Homo sapiens
  source 1..20: mol_type = genomic RNA
tctttgcatcagcattgacc

SEQ ID NO: 13202 - RNA, 20 nt, Homo sapiens
  source 1..20: mol_type = genomic RNA
ctttgcatcagcattgaccg

SEQ ID NO: 13203 - RNA, 20 nt, Homo sapiens
  source 1..20: mol_type = genomic RNA
tttgcatcagcattgaccgc

SEQ ID NO: 13204 - RNA, 20 nt, Homo sapiens
  source 1..20: mol_type = genomic RNA
ttgcatcagcattgaccgct

SEQ ID NO: 13205 - RNA, 20 nt, Homo sapiens
  source 1..20: mol_type = genomic RNA
tgcatcagcattgaccgcta

SEQ ID NO: 13206 - RNA, 20 nt, Homo sapiens
  source 1..20: mol_type = genomic RNA
gcatcagcattgaccgctac

SEQ ID NO: 13207 - RNA, 20 nt, Homo sapiens
  source 1..20: mol_type = genomic RNA
catcagcattgaccgctacg

SEQ ID NO: 13208 - RNA, 20 nt, Homo sapiens
  source 1..20: mol_type = genomic RNA
atcagcattgaccgctacgt

SEQ ID NO: 13209 - RNA, 20 nt, Homo sapiens
  source 1..20: mol_type = genomic RNA
tcagcattgaccgctacgtg

SEQ ID NO: 13210 - RNA, 20 nt, Homo sapiens
  source 1..20: mol_type = genomic RNA
cagcattgaccgctacgtgg

SEQ ID NO: 13211 - RNA, 20 nt, Homo sapiens
  source 1..20: mol_type = genomic RNA
agcattgaccgctacgtggc

SEQ ID NO: 13212 - RNA, 20 nt, Homo sapiens
  source 1..20: mol_type = genomic RNA
gcattgaccgctacgtggcc

SEQ ID NO: 13213 - RNA, 20 nt, Homo sapiens
  source 1..20: mol_type = genomic RNA
cattgaccgctacgtggcca

SEQ ID NO: 13214 - RNA, 20 nt, Homo sapiens
  source 1..20: mol_type = genomic RNA
attgaccgctacgtggccat

SEQ ID NO: 13215 - RNA, 20 nt, Homo sapiens
  source 1..20: mol_type = genomic RNA
ttgaccgctacgtggccatc

SEQ ID NO: 13216 - RNA, 20 nt, Homo sapiens
  source 1..20: mol_type = genomic RNA
tgaccgctacgtggccatcg

SEQ ID NO: 13217 - RNA, 20 nt, Homo sapiens
  source 1..20: mol_type = genomic RNA
gaccgctacgtggccatcgt

SEQ ID NO: 13218 - RNA, 20 nt, Homo sapiens
  source 1..20: mol_type = genomic RNA
accgctacgtggccatcgtc

SEQ ID NO: 13219 - RNA, 20 nt, Homo sapiens
  source 1..20: mol_type = genomic RNA
ccgctacgtggccatcgtcc

SEQ ID NO: 13220 - RNA, 20 nt, Homo sapiens
  source 1..20: mol_type = genomic RNA
cgctacgtggccatcgtcca

SEQ ID NO: 13221 - RNA, 20 nt, Homo sapiens
  source 1..20: mol_type = genomic RNA
gctacgtggccatcgtccag

SEQ ID NO: 13222 - RNA, 20 nt, Homo sapiens
  source 1..20: mol_type = genomic RNA
ctacgtggccatcgtccagg

SEQ ID NO: 13223 - RNA, 20 nt, Homo sapiens
  source 1..20: mol_type = genomic RNA
tacgtggccatcgtccaggc

SEQ ID NO: 13224 - RNA, 20 nt, Homo sapiens
  source 1..20: mol_type = genomic RNA
acgtggccatcgtccaggct

SEQ ID NO: 13225 - RNA, 20 nt, Homo sapiens
  source 1..20: mol_type = genomic RNA
cgtggccatcgtccaggctg

SEQ ID NO: 13226 - RNA, 20 nt, Homo sapiens
  source 1..20: mol_type = genomic RNA
gtggccatcgtccaggctgt

SEQ ID NO: 13227 - RNA, 20 nt, Homo sapiens
  source 1..20: mol_type = genomic RNA
tggccatcgtccaggctgtc

SEQ ID NO: 13228 - RNA, 20 nt, Homo sapiens
  source 1..20: mol_type = genomic RNA
ggccatcgtccaggctgtct

SEQ ID NO: 13229 - RNA, 20 nt, Homo sapiens
  source 1..20: mol_type = genomic RNA
gccatcgtccaggctgtctc

SEQ ID NO: 13230 - RNA, 20 nt, Homo sapiens
  source 1..20: mol_type = genomic RNA
ccatcgtccaggctgtctca

SEQ ID NO: 13231 - RNA, 20 nt, Homo sapiens
  source 1..20: mol_type = genomic RNA
catcgtccaggctgtctcag

SEQ ID NO: 13232 - RNA, 20 nt, Homo sapiens
  source 1..20: mol_type = genomic RNA
atcgtccaggctgtctcagc

SEQ ID NO: 13233 - RNA, 20 nt, Homo sapiens
  source 1..20: mol_type = genomic RNA
tcgtccaggctgtctcagct

SEQ ID NO: 13234 - RNA, 20 nt, Homo sapiens
  source 1..20: mol_type = genomic RNA
cgtccaggctgtctcagctc

SEQ ID NO: 13235 - RNA, 20 nt, Homo sapiens
  source 1..20: mol_type = genomic RNA
gtccaggctgtctcagctca

SEQ ID NO: 13236 - RNA, 20 nt, Homo sapiens
  source 1..20: mol_type = genomic RNA
tccaggctgtctcagctcac

SEQ ID NO: 13237 - RNA, 20 nt, Homo sapiens
  source 1..20: mol_type = genomic RNA
ccaggctgtctcagctcacc

SEQ ID NO: 13238 - RNA, 20 nt, Homo sapiens
  source 1..20: mol_type = genomic RNA
caggctgtctcagctcaccg

SEQ ID NO: 13239 - RNA, 20 nt, Homo sapiens
  source 1..20: mol_type = genomic RNA
aggctgtctcagctcaccgc

SEQ ID NO: 13240 - RNA, 20 nt, Homo sapiens
  source 1..20: mol_type = genomic RNA
ggctgtctcagctcaccgcc

SEQ ID NO: 13241 - RNA, 20 nt, Homo sapiens
  source 1..20: mol_type = genomic RNA
gctgtctcagctcaccgcca

SEQ ID NO: 13242 - RNA, 20 nt, Homo sapiens
  source 1..20: mol_type = genomic RNA
ctgtctcagctcaccgccac

SEQ ID NO: 13243 - RNA, 20 nt, Homo sapiens
  source 1..20: mol_type = genomic RNA
tgtctcagctcaccgccacc

SEQ ID NO: 13244 - RNA, 20 nt, Homo sapiens
  source 1..20: mol_type = genomic RNA
gtctcagctcaccgccaccg

SEQ ID NO: 13245 - RNA, 20 nt, Homo sapiens
  source 1..20: mol_type = genomic RNA
tctcagctcaccgccaccgt

SEQ ID NO: 13246 - RNA, 20 nt, Homo sapiens
  source 1..20: mol_type = genomic RNA
ctcagctcaccgccaccgtg

SEQ ID NO: 13247 - RNA, 20 nt, Homo sapiens
  source 1..20: mol_type = genomic RNA
tcagctcaccgccaccgtgc

SEQ ID NO: 13248 - RNA, 20 nt, Homo sapiens
  source 1..20: mol_type = genomic RNA
cagctcaccgccaccgtgcc

SEQ ID NO: 13249 - RNA, 20 nt, Homo sapiens
  source 1..20: mol_type = genomic RNA
agctcaccgccaccgtgccc

SEQ ID NO: 13250 - RNA, 20 nt, Homo sapiens
  source 1..20: mol_type = genomic RNA
gctcaccgccaccgtgcccg

SEQ ID NO: 13251 - RNA, 20 nt, Homo sapiens
  source 1..20: mol_type = genomic RNA
ctcaccgccaccgtgcccgc

SEQ ID NO: 13252 - RNA, 20 nt, Homo sapiens
  source 1..20: mol_type = genomic RNA
tcaccgccaccgtgcccgcg

SEQ ID NO: 13253 - RNA, 20 nt, Homo sapiens
  source 1..20: mol_type = genomic RNA
caccgccaccgtgcccgcgt

SEQ ID NO: 13254 - RNA, 20 nt, Homo sapiens
  source 1..20: mol_type = genomic RNA
accgccaccgtgcccgcgtc

SEQ ID NO: 13255 - RNA, 20 nt, Homo sapiens
  source 1..20: mol_type = genomic RNA
ccgccaccgtgcccgcgtcc

SEQ ID NO: 13256 - RNA, 20 nt, Homo sapiens
  source 1..20: mol_type = genomic RNA
cgccaccgtgcccgcgtcct

SEQ ID NO: 13257 - RNA, 20 nt, Homo sapiens
  source 1..20: mol_type = genomic RNA
gccaccgtgcccgcgtcctt

SEQ ID NO: 13258 - RNA, 20 nt, Homo sapiens
  source 1..20: mol_type = genomic RNA
ccaccgtgcccgcgtccttc

SEQ ID NO: 13259 - RNA, 20 nt, Homo sapiens
  source 1..20: mol_type = genomic RNA
caccgtgcccgcgtccttct

SEQ ID NO: 13260 - RNA, 20 nt, Homo sapiens
  source 1..20: mol_type = genomic RNA
accgtgcccgcgtccttctc

SEQ ID NO: 13261 - RNA, 20 nt, Homo sapiens
  source 1..20: mol_type = genomic RNA
ccgtgcccgcgtccttctca

SEQ ID NO: 13262 - RNA, 20 nt, Homo sapiens
  source 1..20: mol_type = genomic RNA
cgtgcccgcgtccttctcat

SEQ ID NO: 13263 - RNA, 20 nt, Homo sapiens
  source 1..20: mol_type = genomic RNA
gtgcccgcgtccttctcatc

SEQ ID NO: 13264 - RNA, 20 nt, Homo sapiens
  source 1..20: mol_type = genomic RNA
tgcccgcgtccttctcatca

SEQ ID NO: 13265 - RNA, 20 nt, Homo sapiens
  source 1..20: mol_type = genomic RNA
gcccgcgtccttctcatcag

SEQ ID NO: 13266 - RNA, 20 nt, Homo sapiens
  source 1..20: mol_type = genomic RNA
cccgcgtccttctcatcagc

SEQ ID NO: 13267 - RNA, 20 nt, Homo sapiens
  source 1..20: mol_type = genomic RNA
ccgcgtccttctcatcagca

SEQ ID NO: 13268 - RNA, 20 nt, Homo sapiens
  source 1..20: mol_type = genomic RNA
cgcgtccttctcatcagcaa

SEQ ID NO: 13269 - RNA, 20 nt, Homo sapiens
  source 1..20: mol_type = genomic RNA
gcgtccttctcatcagcaag

SEQ ID NO: 13270 - RNA, 20 nt, Homo sapiens
  source 1..20: mol_type = genomic RNA
cgtccttctcatcagcaagc

SEQ ID NO: 13271 - RNA, 20 nt, Homo sapiens
  source 1..20: mol_type = genomic RNA
gtccttctcatcagcaagct

SEQ ID NO: 13272 - RNA, 20 nt, Homo sapiens
  source 1..20: mol_type = genomic RNA
tccttctcatcagcaagctg

SEQ ID NO: 13273 - RNA, 20 nt, Homo sapiens
  source 1..20: mol_type = genomic RNA
ccttctcatcagcaagctgt

SEQ ID NO: 13274 - RNA, 20 nt, Homo sapiens
  source 1..20: mol_type = genomic RNA
cttctcatcagcaagctgtc

SEQ ID NO: 13275 - RNA, 20 nt, Homo sapiens
  source 1..20: mol_type = genomic RNA
ttctcatcagcaagctgtcc

SEQ ID NO: 13276 - RNA, 20 nt, Homo sapiens
  source 1..20: mol_type = genomic RNA
tctcatcagcaagctgtcct

SEQ ID NO: 13277 - RNA, 20 nt, Homo sapiens
  source 1..20: mol_type = genomic RNA
ctcatcagcaagctgtcctg

SEQ ID NO: 13278 - RNA, 20 nt, Homo sapiens
  source 1..20: mol_type = genomic RNA
tcatcagcaagctgtcctgt

SEQ ID NO: 13279 - RNA, 20 nt, Homo sapiens
  source 1..20: mol_type = genomic RNA
catcagcaagctgtcctgtg

SEQ ID NO: 13280 - RNA, 20 nt, Homo sapiens
  source 1..20: mol_type = genomic RNA
atcagcaagctgtcctgtgt

SEQ ID NO: 13281 - RNA, 20 nt, Homo sapiens
  source 1..20: mol_type = genomic RNA
tcagcaagctgtcctgtgtg

SEQ ID NO: 13282 - RNA, 20 nt, Homo sapiens
  source 1..20: mol_type = genomic RNA
cagcaagctgtcctgtgtgg

SEQ ID NO: 13283 - RNA, 20 nt, Homo sapiens
  source 1..20: mol_type = genomic RNA
agcaagctgtcctgtgtggg

SEQ ID NO: 13284 - RNA, 20 nt, Homo sapiens
  source 1..20: mol_type = genomic RNA
gcaagctgtcctgtgtgggc

SEQ ID NO: 13285 - RNA, 20 nt, Homo sapiens
  source 1..20: mol_type = genomic RNA
caagctgtcctgtgtgggca

SEQ ID NO: 13286 - RNA, 20 nt, Homo sapiens
  source 1..20: mol_type = genomic RNA
aagctgtcctgtgtgggcat

SEQ ID NO: 13287 - RNA, 20 nt, Homo sapiens
  source 1..20: mol_type = genomic RNA
agctgtcctgtgtgggcatc

SEQ ID NO: 13288 - RNA, 20 nt, Homo sapiens
  source 1..20: mol_type = genomic RNA
gctgtcctgtgtgggcatct

SEQ ID NO: 13289 - RNA, 20 nt, Homo sapiens
  source 1..20: mol_type = genomic RNA
ctgtcctgtgtgggcatctg

SEQ ID NO: 13290 - RNA, 20 nt, Homo sapiens
  source 1..20: mol_type = genomic RNA
tgtcctgtgtgggcatctgg

SEQ ID NO: 13291 - RNA, 20 nt, Homo sapiens
  source 1..20: mol_type = genomic RNA
gtcctgtgtgggcatctgga

SEQ ID NO: 13292 - RNA, 20 nt, Homo sapiens
  source 1..20: mol_type = genomic RNA
tcctgtgtgggcatctggat

SEQ ID NO: 13293 - RNA, 20 nt, Homo sapiens
  source 1..20: mol_type = genomic RNA
cctgtgtgggcatctggata

SEQ ID NO: 13294 - RNA, 20 nt, Homo sapiens
  source 1..20: mol_type = genomic RNA
ctgtgtgggcatctggatac

SEQ ID NO: 13295 - RNA, 20 nt, Homo sapiens
  source 1..20: mol_type = genomic RNA
tgtgtgggcatctggatact

SEQ ID NO: 13296 - RNA, 20 nt, Homo sapiens
  source 1..20: mol_type = genomic RNA
gtgtgggcatctggatacta

SEQ ID NO: 13297 - RNA, 20 nt, Homo sapiens
  source 1..20: mol_type = genomic RNA
tgtgggcatctggatactag

SEQ ID NO: 13298 - RNA, 20 nt, Homo sapiens
  source 1..20: mol_type = genomic RNA
gtgggcatctggatactagc

SEQ ID NO: 13299 - RNA, 20 nt, Homo sapiens
  source 1..20: mol_type = genomic RNA
tgggcatctggatactagcc

SEQ ID NO: 13300 - RNA, 20 nt, Homo sapiens
  source 1..20: mol_type = genomic RNA
gggcatctggatactagcca

SEQ ID NO: 13301 - RNA, 20 nt, Homo sapiens
  source 1..20: mol_type = genomic RNA
ggcatctggatactagccac

SEQ ID NO: 13302 - RNA, 20 nt, Homo sapiens
  source 1..20: mol_type = genomic RNA
gcatctggatactagccaca

SEQ ID NO: 13303 - RNA, 20 nt, Homo sapiens
  source 1..20: mol_type = genomic RNA
catctggatactagccacag

SEQ ID NO: 13304 - RNA, 20 nt, Homo sapiens
  source 1..20: mol_type = genomic RNA
atctggatactagccacagt

SEQ ID NO: 13305 - RNA, 20 nt, Homo sapiens
  source 1..20: mol_type = genomic RNA
tctggatactagccacagtg

SEQ ID NO: 13306 - RNA, 20 nt, Homo sapiens
  source 1..20: mol_type = genomic RNA
ctggatactagccacagtgc

SEQ ID NO: 13307 - RNA, 20 nt, Homo sapiens
  source 1..20: mol_type = genomic RNA
tggatactagccacagtgct

SEQ ID NO: 13308 - RNA, 20 nt, Homo sapiens
  source 1..20: mol_type = genomic RNA
ggatactagccacagtgctc

SEQ ID NO: 13309 - RNA, 20 nt, Homo sapiens
  source 1..20: mol_type = genomic RNA
gatactagccacagtgctct

SEQ ID NO: 13310 - RNA, 20 nt, Homo sapiens
  source 1..20: mol_type = genomic RNA
atactagccacagtgctctc

SEQ ID NO: 13311 - RNA, 20 nt, Homo sapiens
  source 1..20: mol_type = genomic RNA
tactagccacagtgctctcc

SEQ ID NO: 13312 - RNA, 20 nt, Homo sapiens
  source 1..20: mol_type = genomic RNA
actagccacagtgctctcca

SEQ ID NO: 13313 - RNA, 20 nt, Homo sapiens
  source 1..20: mol_type = genomic RNA
ctagccacagtgctctccat

SEQ ID NO: 13314 - RNA, 20 nt, Homo sapiens
  source 1..20: mol_type = genomic RNA
tagccacagtgctctccatc

SEQ ID NO: 13315 - RNA, 20 nt, Homo sapiens
  source 1..20: mol_type = genomic RNA
agccacagtgctctccatcc

SEQ ID NO: 13316 - RNA, 20 nt, Homo sapiens
  source 1..20: mol_type = genomic RNA
gccacagtgctctccatccc

SEQ ID NO: 13317 - RNA, 20 nt, Homo sapiens
  source 1..20: mol_type = genomic RNA
ccacagtgctctccatccca

SEQ ID NO: 13318 - RNA, 20 nt, Homo sapiens
  source 1..20: mol_type = genomic RNA
cacagtgctctccatcccag

SEQ ID NO: 13319 - RNA, 20 nt, Homo sapiens
  source 1..20: mol_type = genomic RNA
acagtgctctccatcccaga

SEQ ID NO: 13320 - RNA, 20 nt, Homo sapiens
  source 1..20: mol_type = genomic RNA
cagtgctctccatcccagag

SEQ ID NO: 13321 - RNA, 20 nt, Homo sapiens
  source 1..20: mol_type = genomic RNA
agtgctctccatcccagagc

SEQ ID NO: 13322 - RNA, 20 nt, Homo sapiens
  source 1..20: mol_type = genomic RNA
gtgctctccatcccagagct

SEQ ID NO: 13323 - RNA, 20 nt, Homo sapiens
  source 1..20: mol_type = genomic RNA
tgctctccatcccagagctc

SEQ ID NO: 13324 - RNA, 20 nt, Homo sapiens
  source 1..20: mol_type = genomic RNA
gctctccatcccagagctcc

SEQ ID NO: 13325 - RNA, 20 nt, Homo sapiens
  source 1..20: mol_type = genomic RNA
ctctccatcccagagctcct

SEQ ID NO: 13326 - RNA, 20 nt, Homo sapiens
  source 1..20: mol_type = genomic RNA
tctccatcccagagctcctg

SEQ ID NO: 13327 - RNA, 20 nt, Homo sapiens
  source 1..20: mol_type = genomic RNA
ctccatcccagagctcctgt

SEQ ID NO: 13328 - RNA, 20 nt, Homo sapiens
  source 1..20: mol_type = genomic RNA
tccatcccagagctcctgta

SEQ ID NO: 13329 - RNA, 20 nt, Homo sapiens
  source 1..20: mol_type = genomic RNA
ccatcccagagctcctgtac

SEQ ID NO: 13330 - RNA, 20 nt, Homo sapiens
  source 1..20: mol_type = genomic RNA
catcccagagctcctgtaca

SEQ ID NO: 13331 - RNA, 20 nt, Homo sapiens
  source 1..20: mol_type = genomic RNA
atcccagagctcctgtacag

SEQ ID NO: 13332 - RNA, 20 nt, Homo sapiens
  source 1..20: mol_type = genomic RNA
tcccagagctcctgtacagt

SEQ ID NO: 13333 - RNA, 20 nt, Homo sapiens
  source 1..20: mol_type = genomic RNA
cccagagctcctgtacagtg

SEQ ID NO: 13334 - RNA, 20 nt, Homo sapiens
  source 1..20: mol_type = genomic RNA
ccagagctcctgtacagtga

SEQ ID NO: 13335 - RNA, 20 nt, Homo sapiens
  source 1..20: mol_type = genomic RNA
cagagctcctgtacagtgac

SEQ ID NO: 13336 - RNA, 20 nt, Homo sapiens
  source 1..20: mol_type = genomic RNA
agagctcctgtacagtgacc

SEQ ID NO: 13337 - RNA, 20 nt, Homo sapiens
  source 1..20: mol_type = genomic RNA
gagctcctgtacagtgacct

SEQ ID NO: 13338 - RNA, 20 nt, Homo sapiens
  source 1..20: mol_type = genomic RNA
agctcctgtacagtgacctc

SEQ ID NO: 13339 - RNA, 20 nt, Homo sapiens
  source 1..20: mol_type = genomic RNA
gctcctgtacagtgacctcc

SEQ ID NO: 13340 - RNA, 20 nt, Homo sapiens
  source 1..20: mol_type = genomic RNA
ctcctgtacagtgacctcca

SEQ ID NO: 13341 - RNA, 20 nt, Homo sapiens
  source 1..20: mol_type = genomic RNA
tcctgtacagtgacctccag

SEQ ID NO: 13342 - RNA, 20 nt, Homo sapiens
  source 1..20: mol_type = genomic RNA
cctgtacagtgacctccaga

SEQ ID NO: 13343 - RNA, 20 nt, Homo sapiens
  source 1..20: mol_type = genomic RNA
ctgtacagtgacctccagag

SEQ ID NO: 13344 - RNA, 20 nt, Homo sapiens
  source 1..20: mol_type = genomic RNA
tgtacagtgacctccagagg

SEQ ID NO: 13345 - RNA, 20 nt, Homo sapiens
  source 1..20: mol_type = genomic RNA
gtacagtgacctccagagga

SEQ ID NO: 13346 - RNA, 20 nt, Homo sapiens
  source 1..20: mol_type = genomic RNA
tacagtgacctccagaggag

SEQ ID NO: 13347 - RNA, 20 nt, Homo sapiens
  source 1..20: mol_type = genomic RNA
acagtgacctccagaggagc

SEQ ID NO: 13348 - RNA, 20 nt, Homo sapiens
  source 1..20: mol_type = genomic RNA
cagtgacctccagaggagca

SEQ ID NO: 13349 - RNA, 20 nt, Homo sapiens
  source 1..20: mol_type = genomic RNA
agtgacctccagaggagcag

SEQ ID NO: 13350 - RNA, 20 nt, Homo sapiens
  source 1..20: mol_type = genomic RNA
gtgacctccagaggagcagc

SEQ ID NO: 13351 - RNA, 20 nt, Homo sapiens
  source 1..20: mol_type = genomic RNA
tgacctccagaggagcagca

SEQ ID NO: 13352 - RNA, 20 nt, Homo sapiens
  source 1..20: mol_type = genomic RNA
gacctccagaggagcagcag

SEQ ID NO: 13353 - RNA, 20 nt, Homo sapiens
  source 1..20: mol_type = genomic RNA
acctccagaggagcagcagt

SEQ ID NO: 13354 - RNA, 20 nt, Homo sapiens
  source 1..20: mol_type = genomic RNA
cctccagaggagcagcagtg

SEQ ID NO: 13355 - RNA, 20 nt, Homo sapiens
  source 1..20: mol_type = genomic RNA
ctccagaggagcagcagtga

SEQ ID NO: 13356 - RNA, 20 nt, Homo sapiens
  source 1..20: mol_type = genomic RNA
tccagaggagcagcagtgag

SEQ ID NO: 13357 - RNA, 20 nt, Homo sapiens
  source 1..20: mol_type = genomic RNA
ccagaggagcagcagtgagc

SEQ ID NO: 13358 - RNA, 20 nt, Homo sapiens
  source 1..20: mol_type = genomic RNA
cagaggagcagcagtgagca

SEQ ID NO: 13359 - RNA, 20 nt, Homo sapiens
  source 1..20: mol_type = genomic RNA
agaggagcagcagtgagcaa

SEQ ID NO: 13360 - RNA, 20 nt, Homo sapiens
  source 1..20: mol_type = genomic RNA
gaggagcagcagtgagcaag

SEQ ID NO: 13361 - RNA, 20 nt, Homo sapiens
  source 1..20: mol_type = genomic RNA
aggagcagcagtgagcaagc

SEQ ID NO: 13362 - RNA, 20 nt, Homo sapiens
  source 1..20: mol_type = genomic RNA
ggagcagcagtgagcaagcg

SEQ ID NO: 13363 - RNA, 20 nt, Homo sapiens
  source 1..20: mol_type = genomic RNA
gagcagcagtgagcaagcga

SEQ ID NO: 13364 - RNA, 20 nt, Homo sapiens
  source 1..20: mol_type = genomic RNA
agcagcagtgagcaagcgat

SEQ ID NO: 13365 - RNA, 20 nt, Homo sapiens
  source 1..20: mol_type = genomic RNA
gcagcagtgagcaagcgatg

SEQ ID NO: 13366 - RNA, 20 nt, Homo sapiens
  source 1..20: mol_type = genomic RNA
cagcagtgagcaagcgatgc

SEQ ID NO: 13367 - RNA, 20 nt, Homo sapiens
  source 1..20: mol_type = genomic RNA
agcagtgagcaagcgatgcg

SEQ ID NO: 13368 - RNA, 20 nt, Homo sapiens
  source 1..20: mol_type = genomic RNA
gcagtgagcaagcgatgcga

SEQ ID NO: 13369 - RNA, 20 nt, Homo sapiens
  source 1..20: mol_type = genomic RNA
cagtgagcaagcgatgcgat

SEQ ID NO: 13370 - RNA, 20 nt, Homo sapiens
  source 1..20: mol_type = genomic RNA
agtgagcaagcgatgcgatg

SEQ ID NO: 13371 - RNA, 20 nt, Homo sapiens
  source 1..20: mol_type = genomic RNA
gtgagcaagcgatgcgatgc

SEQ ID NO: 13372 - RNA, 20 nt, Homo sapiens
  source 1..20: mol_type = genomic RNA
tgagcaagcgatgcgatgct

SEQ ID NO: 13373 - RNA, 20 nt, Homo sapiens
  source 1..20: mol_type = genomic RNA
gagcaagcgatgcgatgctc

SEQ ID NO: 13374 - RNA, 20 nt, Homo sapiens
  source 1..20: mol_type = genomic RNA
agcaagcgatgcgatgctct

SEQ ID NO: 13375 - RNA, 20 nt, Homo sapiens
  source 1..20: mol_type = genomic RNA
gcaagcgatgcgatgctctc

SEQ ID NO: 13376 - RNA, 20 nt, Homo sapiens
  source 1..20: mol_type = genomic RNA
caagcgatgcgatgctctct

SEQ ID NO: 13377 - RNA, 20 nt, Homo sapiens
  source 1..20: mol_type = genomic RNA
aagcgatgcgatgctctctc

SEQ ID NO: 13378 - RNA, 20 nt, Homo sapiens
  source 1..20: mol_type = genomic RNA
agcgatgcgatgctctctca

SEQ ID NO: 13379 - RNA, 20 nt, Homo sapiens
  source 1..20: mol_type = genomic RNA
gcgatgcgatgctctctcat

SEQ ID NO: 13380 - RNA, 20 nt, Homo sapiens
  source 1..20: mol_type = genomic RNA
cgatgcgatgctctctcatc

SEQ ID NO: 13381 - RNA, 20 nt, Homo sapiens
  source 1..20: mol_type = genomic RNA
gatgcgatgctctctcatca

SEQ ID NO: 13382 - RNA, 20 nt, Homo sapiens
  source 1..20: mol_type = genomic RNA
atgcgatgctctctcatcac

SEQ ID NO: 13383 - RNA, 20 nt, Homo sapiens
  source 1..20: mol_type = genomic RNA
tgcgatgctctctcatcaca

SEQ ID NO: 13384 - RNA, 20 nt, Homo sapiens
  source 1..20: mol_type = genomic RNA
gcgatgctctctcatcacag

SEQ ID NO: 13385 - RNA, 20 nt, Homo sapiens
  source 1..20: mol_type = genomic RNA
cgatgctctctcatcacaga

SEQ ID NO: 13386 - RNA, 20 nt, Homo sapiens
  source 1..20: mol_type = genomic RNA
gatgctctctcatcacagag

SEQ ID NO: 13387 - RNA, 20 nt, Homo sapiens
  source 1..20: mol_type = genomic RNA
atgctctctcatcacagagc

SEQ ID NO: 13388 - RNA, 20 nt, Homo sapiens
  source 1..20: mol_type = genomic RNA
tgctctctcatcacagagca

SEQ ID NO: 13389 - RNA, 20 nt, Homo sapiens
  source 1..20: mol_type = genomic RNA
gctctctcatcacagagcat

SEQ ID NO: 13390 - RNA, 20 nt, Homo sapiens
  source 1..20: mol_type = genomic RNA
ctctctcatcacagagcatg

SEQ ID NO: 13391 - RNA, 20 nt, Homo sapiens
  source 1..20: mol_type = genomic RNA
tctctcatcacagagcatgt

SEQ ID NO: 13392 - RNA, 20 nt, Homo sapiens
  source 1..20: mol_type = genomic RNA
ctctcatcacagagcatgtg

SEQ ID NO: 13393 - RNA, 20 nt, Homo sapiens
  source 1..20: mol_type = genomic RNA
tctcatcacagagcatgtgg

SEQ ID NO: 13394 - RNA, 20 nt, Homo sapiens
  source 1..20: mol_type = genomic RNA
ctcatcacagagcatgtgga

SEQ ID NO: 13395 - RNA, 20 nt, Homo sapiens
  source 1..20: mol_type = genomic RNA
tcatcacagagcatgtggag

SEQ ID NO: 13396 - RNA, 20 nt, Homo sapiens
  source 1..20: mol_type = genomic RNA
catcacagagcatgtggagg

SEQ ID NO: 13397 - RNA, 20 nt, Homo sapiens
  source 1..20: mol_type = genomic RNA
atcacagagcatgtggaggc

SEQ ID NO: 13398 - RNA, 20 nt, Homo sapiens
  source 1..20: mol_type = genomic RNA
tcacagagcatgtggaggcc

SEQ ID NO: 13399 - RNA, 20 nt, Homo sapiens
  source 1..20: mol_type = genomic RNA
cacagagcatgtggaggcct

SEQ ID NO: 13400 - RNA, 20 nt, Homo sapiens
  source 1..20: mol_type = genomic RNA
acagagcatgtggaggcctt

SEQ ID NO: 13401 - RNA, 20 nt, Homo sapiens
  source 1..20: mol_type = genomic RNA
cagagcatgtggaggccttt

SEQ ID NO: 13402 - RNA, 20 nt, Homo sapiens
  source 1..20: mol_type = genomic RNA
agagcatgtggaggccttta

SEQ ID NO: 13403 - RNA, 20 nt, Homo sapiens
  source 1..20: mol_type = genomic RNA
gagcatgtggaggcctttat

SEQ ID NO: 13404 - RNA, 20 nt, Homo sapiens
  source 1..20: mol_type = genomic RNA
agcatgtggaggcctttatc

SEQ ID NO: 13405 - RNA, 20 nt, Homo sapiens
  source 1..20: mol_type = genomic RNA
gcatgtggaggcctttatca

SEQ ID NO: 13406 - RNA, 20 nt, Homo sapiens
  source 1..20: mol_type = genomic RNA
catgtggaggcctttatcac

SEQ ID NO: 13407 - RNA, 20 nt, Homo sapiens
  source 1..20: mol_type = genomic RNA
atgtggaggcctttatcacc

SEQ ID NO: 13408 - RNA, 20 nt, Homo sapiens
  source 1..20: mol_type = genomic RNA
tgtggaggcctttatcacca

SEQ ID NO: 13409 - RNA, 20 nt, Homo sapiens
  source 1..20: mol_type = genomic RNA
gtggaggcctttatcaccat

SEQ ID NO: 13410 - RNA, 20 nt, Homo sapiens
  source 1..20: mol_type = genomic RNA
tggaggcctttatcaccatc

SEQ ID NO: 13411 - RNA, 20 nt, Homo sapiens
  source 1..20: mol_type = genomic RNA
ggaggcctttatcaccatcc

SEQ ID NO: 13412 - RNA, 20 nt, Homo sapiens
  source 1..20: mol_type = genomic RNA
gaggcctttatcaccatcca

SEQ ID NO: 13413 - RNA, 20 nt, Homo sapiens
  source 1..20: mol_type = genomic RNA
aggcctttatcaccatccag

SEQ ID NO: 13414 - RNA, 20 nt, Homo sapiens
  source 1..20: mol_type = genomic RNA
ggcctttatcaccatccagg

SEQ ID NO: 13415 - RNA, 20 nt, Homo sapiens
  source 1..20: mol_type = genomic RNA
gcctttatcaccatccaggt

SEQ ID NO: 13416 - RNA, 20 nt, Homo sapiens
  source 1..20: mol_type = genomic RNA
cctttatcaccatccaggtg

SEQ ID NO: 13417 - RNA, 20 nt, Homo sapiens
  source 1..20: mol_type = genomic RNA
ctttatcaccatccaggtgg

SEQ ID NO: 13418 - RNA, 20 nt, Homo sapiens
  source 1..20: mol_type = genomic RNA
tttatcaccatccaggtggc

SEQ ID NO: 13419 - RNA, 20 nt, Homo sapiens
  source 1..20: mol_type = genomic RNA
ttatcaccatccaggtggcc

SEQ ID NO: 13420 - RNA, 20 nt, Homo sapiens
  source 1..20: mol_type = genomic RNA
tatcaccatccaggtggccc

SEQ ID NO: 13421 - RNA, 20 nt, Homo sapiens
  source 1..20: mol_type = genomic RNA
atcaccatccaggtggccca

SEQ ID NO: 13422 - RNA, 20 nt, Homo sapiens
  source 1..20: mol_type = genomic RNA
tcaccatccaggtggcccag

SEQ ID NO: 13423 - RNA, 20 nt, Homo sapiens
  source 1..20: mol_type = genomic RNA
caccatccaggtggcccaga

SEQ ID NO: 13424 - RNA, 20 nt, Homo sapiens
  source 1..20: mol_type = genomic RNA
accatccaggtggcccagat

SEQ ID NO: 13425 - RNA, 20 nt, Homo sapiens
  source 1..20: mol_type = genomic RNA
ccatccaggtggcccagatg

SEQ ID NO: 13426 - RNA, 20 nt, Homo sapiens
  source 1..20: mol_type = genomic RNA
catccaggtggcccagatgg

SEQ ID NO: 13427 - RNA, 20 nt, Homo sapiens
  source 1..20: mol_type = genomic RNA
atccaggtggcccagatggt

SEQ ID NO: 13428 - RNA, 20 nt, Homo sapiens
  source 1..20: mol_type = genomic RNA
tccaggtggcccagatggtg

SEQ ID NO: 13429 - RNA, 20 nt, Homo sapiens
  source 1..20: mol_type = genomic RNA
ccaggtggcccagatggtga

SEQ ID NO: 13430 - RNA, 20 nt, Homo sapiens
  source 1..20: mol_type = genomic RNA
caggtggcccagatggtgat

SEQ ID NO: 13431 - RNA, 20 nt, Homo sapiens
  source 1..20: mol_type = genomic RNA
aggtggcccagatggtgatc

SEQ ID NO: 13432 - RNA, 20 nt, Homo sapiens
  source 1..20: mol_type = genomic RNA
ggtggcccagatggtgatcg

SEQ ID NO: 13433 - RNA, 20 nt, Homo sapiens
  source 1..20: mol_type = genomic RNA
gtggcccagatggtgatcgg

SEQ ID NO: 13434 - RNA, 20 nt, Homo sapiens
  source 1..20: mol_type = genomic RNA
tggcccagatggtgatcggc

SEQ ID NO: 13435 - RNA, 20 nt, Homo sapiens
  source 1..20: mol_type = genomic RNA
ggcccagatggtgatcggct

SEQ ID NO: 13436 - RNA, 20 nt, Homo sapiens
  source 1..20: mol_type = genomic RNA
gcccagatggtgatcggctt

SEQ ID NO: 13437 - RNA, 20 nt, Homo sapiens
  source 1..20: mol_type = genomic RNA
cccagatggtgatcggcttt

SEQ ID NO: 13438 - RNA, 20 nt, Homo sapiens
  source 1..20: mol_type = genomic RNA
ccagatggtgatcggctttc

SEQ ID NO: 13439 - RNA, 20 nt, Homo sapiens
  source 1..20: mol_type = genomic RNA
cagatggtgatcggctttct

SEQ ID NO: 13440 - RNA, 20 nt, Homo sapiens
  source 1..20: mol_type = genomic RNA
agatggtgatcggctttctg

SEQ ID NO: 13441 - RNA, 20 nt, Homo sapiens
  source 1..20: mol_type = genomic RNA
gatggtgatcggctttctgg

SEQ ID NO: 13442 - RNA, 20 nt, Homo sapiens
  source 1..20: mol_type = genomic RNA
atggtgatcggctttctggt

SEQ ID NO: 13443 - RNA, 20 nt, Homo sapiens
  source 1..20: mol_type = genomic RNA
tggtgatcggctttctggtc

SEQ ID NO: 13444 - RNA, 20 nt, Homo sapiens
  source 1..20: mol_type = genomic RNA
ggtgatcggctttctggtcc

SEQ ID NO: 13445 - RNA, 20 nt, Homo sapiens
  source 1..20: mol_type = genomic RNA
gtgatcggctttctggtccc

SEQ ID NO: 13446 - RNA, 20 nt, Homo sapiens
  source 1..20: mol_type = genomic RNA
tgatcggctttctggtcccc

SEQ ID NO: 13447 - RNA, 20 nt, Homo sapiens
  source 1..20: mol_type = genomic RNA
gatcggctttctggtccccc

SEQ ID NO: 13448 - RNA, 20 nt, Homo sapiens
  source 1..20: mol_type = genomic RNA
atcggctttctggtccccct

SEQ ID NO: 13449 - RNA, 20 nt, Homo sapiens
  source 1..20: mol_type = genomic RNA
tcggctttctggtccccctg

SEQ ID NO: 13450 - RNA, 20 nt, Homo sapiens
  source 1..20: mol_type = genomic RNA
cggctttctggtccccctgc

SEQ ID NO: 13451 - RNA, 20 nt, Homo sapiens
  source 1..20: mol_type = genomic RNA
ggctttctggtccccctgct

SEQ ID NO: 13452 - RNA, 20 nt, Homo sapiens
  source 1..20: mol_type = genomic RNA
gctttctggtccccctgctg

SEQ ID NO: 13453 - RNA, 20 nt, Homo sapiens
  source 1..20: mol_type = genomic RNA
ctttctggtccccctgctgg

SEQ ID NO: 13454 - RNA, 20 nt, Homo sapiens
  source 1..20: mol_type = genomic RNA
tttctggtccccctgctggc

SEQ ID NO: 13455 - RNA, 20 nt, Homo sapiens
  source 1..20: mol_type = genomic RNA
ttctggtccccctgctggcc

SEQ ID NO: 13456 - RNA, 20 nt, Homo sapiens
  source 1..20: mol_type = genomic RNA
tctggtccccctgctggcca

SEQ ID NO: 13457 - RNA, 20 nt, Homo sapiens
  source 1..20: mol_type = genomic RNA
ctggtccccctgctggccat

SEQ ID NO: 13458 - RNA, 20 nt, Homo sapiens
  source 1..20: mol_type = genomic RNA
tggtccccctgctggccatg

SEQ ID NO: 13459 - RNA, 20 nt, Homo sapiens
  source 1..20: mol_type = genomic RNA
ggtccccctgctggccatga

SEQ ID NO: 13460 - RNA, 20 nt, Homo sapiens
  source 1..20: mol_type = genomic RNA
gtccccctgctggccatgag

SEQ ID NO: 13461 - RNA, 20 nt, Homo sapiens
  source 1..20: mol_type = genomic RNA
tccccctgctggccatgagc

SEQ ID NO: 13462 - RNA, 20 nt, Homo sapiens
  source 1..20: mol_type = genomic RNA
ccccctgctggccatgagct

SEQ ID NO: 13463 - RNA, 20 nt, Homo sapiens
  source 1..20: mol_type = genomic RNA
cccctgctggccatgagctt

SEQ ID NO: 13464 - RNA, 20 nt, Homo sapiens
  source 1..20: mol_type = genomic RNA
ccctgctggccatgagcttc

SEQ ID NO: 13465 - RNA, 20 nt, Homo sapiens
  source 1..20: mol_type = genomic RNA
cctgctggccatgagcttct

SEQ ID NO: 13466 - RNA, 20 nt, Homo sapiens
  source 1..20: mol_type = genomic RNA
ctgctggccatgagcttctg

SEQ ID NO: 13467 - RNA, 20 nt, Homo sapiens
  source 1..20: mol_type = genomic RNA
tgctggccatgagcttctgt

SEQ ID NO: 13468 - RNA, 20 nt, Homo sapiens
  source 1..20: mol_type = genomic RNA
gctggccatgagcttctgtt

SEQ ID NO: 13469 - RNA, 20 nt, Homo sapiens
  source 1..20: mol_type = genomic RNA
ctggccatgagcttctgtta

SEQ ID NO: 13470 - RNA, 20 nt, Homo sapiens
  source 1..20: mol_type = genomic RNA
tggccatgagcttctgttac

SEQ ID NO: 13471 - RNA, 20 nt, Homo sapiens
  source 1..20: mol_type = genomic RNA
ggccatgagcttctgttacc

SEQ ID NO: 13472 - RNA, 20 nt, Homo sapiens
  source 1..20: mol_type = genomic RNA
gccatgagcttctgttacct

SEQ ID NO: 13473 - RNA, 20 nt, Homo sapiens
  source 1..20: mol_type = genomic RNA
ccatgagcttctgttacctt

SEQ ID NO: 13474 - RNA, 20 nt, Homo sapiens
  source 1..20: mol_type = genomic RNA
catgagcttctgttaccttg

SEQ ID NO: 13475 - RNA, 20 nt, Homo sapiens
  source 1..20: mol_type = genomic RNA
atgagcttctgttaccttgt

SEQ ID NO: 13476 - RNA, 20 nt, Homo sapiens
  source 1..20: mol_type = genomic RNA
tgagcttctgttaccttgtc

SEQ ID NO: 13477 - RNA, 20 nt, Homo sapiens
  source 1..20: mol_type = genomic RNA
gagcttctgttaccttgtca

SEQ ID NO: 13478 - RNA, 20 nt, Homo sapiens
  source 1..20: mol_type = genomic RNA
agcttctgttaccttgtcat

SEQ ID NO: 13479 - RNA, 20 nt, Homo sapiens
  source 1..20: mol_type = genomic RNA
gcttctgttaccttgtcatc

SEQ ID NO: 13480 - RNA, 20 nt, Homo sapiens
  source 1..20: mol_type = genomic RNA
cttctgttaccttgtcatca

SEQ ID NO: 13481 - RNA, 20 nt, Homo sapiens
  source 1..20: mol_type = genomic RNA
ttctgttaccttgtcatcat

SEQ ID NO: 13482 - RNA, 20 nt, Homo sapiens
  source 1..20: mol_type = genomic RNA
tctgttaccttgtcatcatc

SEQ ID NO: 13483 - RNA, 20 nt, Homo sapiens
  source 1..20: mol_type = genomic RNA
ctgttaccttgtcatcatcc

SEQ ID NO: 13484 - RNA, 20 nt, Homo sapiens
  source 1..20: mol_type = genomic RNA
tgttaccttgtcatcatccg

SEQ ID NO: 13485 - RNA, 20 nt, Homo sapiens
  source 1..20: mol_type = genomic RNA
gttaccttgtcatcatccgc

SEQ ID NO: 13486 - RNA, 20 nt, Homo sapiens
  source 1..20: mol_type = genomic RNA
ttaccttgtcatcatccgca

SEQ ID NO: 13487 - RNA, 20 nt, Homo sapiens
  source 1..20: mol_type = genomic RNA
taccttgtcatcatccgcac

SEQ ID NO: 13488 - RNA, 20 nt, Homo sapiens
  source 1..20: mol_type = genomic RNA
accttgtcatcatccgcacc

SEQ ID NO: 13489 - RNA, 20 nt, Homo sapiens
  source 1..20: mol_type = genomic RNA
ccttgtcatcatccgcaccc

SEQ ID NO: 13490 - RNA, 20 nt, Homo sapiens
  source 1..20: mol_type = genomic RNA
cttgtcatcatccgcaccct

SEQ ID NO: 13491 - RNA, 20 nt, Homo sapiens
  source 1..20: mol_type = genomic RNA
ttgtcatcatccgcaccctg

SEQ ID NO: 13492 - RNA, 20 nt, Homo sapiens
  source 1..20: mol_type = genomic RNA
tgtcatcatccgcaccctgc

SEQ ID NO: 13493 - RNA, 20 nt, Homo sapiens
  source 1..20: mol_type = genomic RNA
gtcatcatccgcaccctgct

SEQ ID NO: 13494 - RNA, 20 nt, Homo sapiens
  source 1..20: mol_type = genomic RNA
tcatcatccgcaccctgctc

SEQ ID NO: 13495 - RNA, 20 nt, Homo sapiens
  source 1..20: mol_type = genomic RNA
catcatccgcaccctgctcc

SEQ ID NO: 13496 - RNA, 20 nt, Homo sapiens
  source 1..20: mol_type = genomic RNA
atcatccgcaccctgctcca

SEQ ID NO: 13497 - RNA, 20 nt, Homo sapiens
  source 1..20: mol_type = genomic RNA
tcatccgcaccctgctccag

SEQ ID NO: 13498 - RNA, 20 nt, Homo sapiens
  source 1..20: mol_type = genomic RNA
catccgcaccctgctccagg

SEQ ID NO: 13499 - RNA, 20 nt, Homo sapiens
  source 1..20: mol_type = genomic RNA
atccgcaccctgctccaggc

SEQ ID NO: 13500 - RNA, 20 nt, Homo sapiens
  source 1..20: mol_type = genomic RNA
tccgcaccctgctccaggca

SEQ ID NO: 13501 - RNA, 20 nt, Homo sapiens
  source 1..20: mol_type = genomic RNA
ccgcaccctgctccaggcac

SEQ ID NO: 13502 - RNA, 20 nt, Homo sapiens
  source 1..20: mol_type = genomic RNA
cgcaccctgctccaggcacg

SEQ ID NO: 13503 - RNA, 20 nt, Homo sapiens
  source 1..20: mol_type = genomic RNA
gcaccctgctccaggcacgc

SEQ ID NO: 13504 - RNA, 20 nt, Homo sapiens
  source 1..20: mol_type = genomic RNA
caccctgctccaggcacgca

SEQ ID NO: 13505 - RNA, 20 nt, Homo sapiens
  source 1..20: mol_type = genomic RNA
accctgctccaggcacgcaa

SEQ ID NO: 13506 - RNA, 20 nt, Homo sapiens
  source 1..20: mol_type = genomic RNA
ccctgctccaggcacgcaac

SEQ ID NO: 13507 - RNA, 20 nt, Homo sapiens
  source 1..20: mol_type = genomic RNA
cctgctccaggcacgcaact

SEQ ID NO: 13508 - RNA, 20 nt, Homo sapiens
  source 1..20: mol_type = genomic RNA
ctgctccaggcacgcaactt

SEQ ID NO: 13509 - RNA, 20 nt, Homo sapiens
  source 1..20: mol_type = genomic RNA
tgctccaggcacgcaacttt

SEQ ID NO: 13510 - RNA, 20 nt, Homo sapiens
  source 1..20: mol_type = genomic RNA
gctccaggcacgcaactttg

SEQ ID NO: 13511 - RNA, 20 nt, Homo sapiens
  source 1..20: mol_type = genomic RNA
ctccaggcacgcaactttga

SEQ ID NO: 13512 - RNA, 20 nt, Homo sapiens
  source 1..20: mol_type = genomic RNA
tccaggcacgcaactttgag

SEQ ID NO: 13513 - RNA, 20 nt, Homo sapiens
  source 1..20: mol_type = genomic RNA
ccaggcacgcaactttgagc

SEQ ID NO: 13514 - RNA, 20 nt, Homo sapiens
  source 1..20: mol_type = genomic RNA
caggcacgcaactttgagcg

SEQ ID NO: 13515 - RNA, 20 nt, Homo sapiens
  source 1..20: mol_type = genomic RNA
aggcacgcaactttgagcgc

SEQ ID NO: 13516 - RNA, 20 nt, Homo sapiens
  source 1..20: mol_type = genomic RNA
ggcacgcaactttgagcgca

SEQ ID NO: 13517 - RNA, 20 nt, Homo sapiens
  source 1..20: mol_type = genomic RNA
gcacgcaactttgagcgcaa

SEQ ID NO: 13518 - RNA, 20 nt, Homo sapiens
  source 1..20: mol_type = genomic RNA
cacgcaactttgagcgcaac

SEQ ID NO: 13519 - RNA, 20 nt, Homo sapiens
  source 1..20: mol_type = genomic RNA
acgcaactttgagcgcaaca

SEQ ID NO: 13520 - RNA, 20 nt, Homo sapiens
  source 1..20: mol_type = genomic RNA
cgcaactttgagcgcaacaa

SEQ ID NO: 13521 - RNA, 20 nt, Homo sapiens
  source 1..20: mol_type = genomic RNA
gcaactttgagcgcaacaag

SEQ ID NO: 13522 - RNA, 20 nt, Homo sapiens
  source 1..20: mol_type = genomic RNA
caactttgagcgcaacaagg

SEQ ID NO: 13523 - RNA, 20 nt, Homo sapiens
  source 1..20: mol_type = genomic RNA
aactttgagcgcaacaaggc

SEQ ID NO: 13524 - RNA, 20 nt, Homo sapiens
  source 1..20: mol_type = genomic RNA
actttgagcgcaacaaggcc

SEQ ID NO: 13525 - RNA, 20 nt, Homo sapiens
  source 1..20: mol_type = genomic RNA
ctttgagcgcaacaaggcca

SEQ ID NO: 13526 - RNA, 20 nt, Homo sapiens
  source 1..20: mol_type = genomic RNA
tttgagcgcaacaaggccat

SEQ ID NO: 13527 - RNA, 20 nt, Homo sapiens
  source 1..20: mol_type = genomic RNA
ttgagcgcaacaaggccatc

SEQ ID NO: 13528 - RNA, 20 nt, Homo sapiens
  source 1..20: mol_type = genomic RNA
tgagcgcaacaaggccatca

SEQ ID NO: 13529 - RNA, 20 nt, Homo sapiens
  source 1..20: mol_type = genomic RNA
gagcgcaacaaggccatcaa

SEQ ID NO: 13530 - RNA, 20 nt, Homo sapiens
  source 1..20: mol_type = genomic RNA
agcgcaacaaggccatcaag

SEQ ID NO: 13531 - RNA, 20 nt, Homo sapiens
  source 1..20: mol_type = genomic RNA
gcgcaacaaggccatcaagg

SEQ ID NO: 13532 - RNA, 20 nt, Homo sapiens
  source 1..20: mol_type = genomic RNA
cgcaacaaggccatcaaggt

SEQ ID NO: 13533 - RNA, 20 nt, Homo sapiens
  source 1..20: mol_type = genomic RNA
gcaacaaggccatcaaggtg

SEQ ID NO: 13534 - RNA, 20 nt, Homo sapiens
  source 1..20: mol_type = genomic RNA
caacaaggccatcaaggtga

SEQ ID NO: 13535 - RNA, 20 nt, Homo sapiens
  source 1..20: mol_type = genomic RNA
aacaaggccatcaaggtgat

SEQ ID NO: 13536 - RNA, 20 nt, Homo sapiens
  source 1..20: mol_type = genomic RNA
acaaggccatcaaggtgatc

SEQ ID NO: 13537 - RNA, 20 nt, Homo sapiens
  source 1..20: mol_type = genomic RNA
caaggccatcaaggtgatca

SEQ ID NO: 13538 - RNA, 20 nt, Homo sapiens
  source 1..20: mol_type = genomic RNA
aaggccatcaaggtgatcat

SEQ ID NO: 13539 - RNA, 20 nt, Homo sapiens
  source 1..20: mol_type = genomic RNA
aggccatcaaggtgatcatc

SEQ ID NO: 13540 - RNA, 20 nt, Homo sapiens
  source 1..20: mol_type = genomic RNA
ggccatcaaggtgatcatcg

SEQ ID NO: 13541 - RNA, 20 nt, Homo sapiens
  source 1..20: mol_type = genomic RNA
gccatcaaggtgatcatcgc

SEQ ID NO: 13542 - RNA, 20 nt, Homo sapiens
  source 1..20: mol_type = genomic RNA
ccatcaaggtgatcatcgct

SEQ ID NO: 13543 - RNA, 20 nt, Homo sapiens
  source 1..20: mol_type = genomic RNA
catcaaggtgatcatcgctg

SEQ ID NO: 13544 - RNA, 20 nt, Homo sapiens
  source 1..20: mol_type = genomic RNA
atcaaggtgatcatcgctgt

SEQ ID NO: 13545 - RNA, 20 nt, Homo sapiens
  source 1..20: mol_type = genomic RNA
tcaaggtgatcatcgctgtg

SEQ ID NO: 13546 - RNA, 20 nt, Homo sapiens
  source 1..20: mol_type = genomic RNA
caaggtgatcatcgctgtgg

SEQ ID NO: 13547 - RNA, 20 nt, Homo sapiens
  source 1..20: mol_type = genomic RNA
aaggtgatcatcgctgtggt

SEQ ID NO: 13548 - RNA, 20 nt, Homo sapiens
  source 1..20: mol_type = genomic RNA
aggtgatcatcgctgtggtc

SEQ ID NO: 13549 - RNA, 20 nt, Homo sapiens
  source 1..20: mol_type = genomic RNA
ggtgatcatcgctgtggtcg

SEQ ID NO: 13550 - RNA, 20 nt, Homo sapiens
  source 1..20: mol_type = genomic RNA
gtgatcatcgctgtggtcgt

SEQ ID NO: 13551 - RNA, 20 nt, Homo sapiens
  source 1..20: mol_type = genomic RNA
tgatcatcgctgtggtcgtg

SEQ ID NO: 13552 - RNA, 20 nt, Homo sapiens
  source 1..20: mol_type = genomic RNA
gatcatcgctgtggtcgtgg

SEQ ID NO: 13553 - RNA, 20 nt, Homo sapiens
  source 1..20: mol_type = genomic RNA
atcatcgctgtggtcgtggt

SEQ ID NO: 13554 - RNA, 20 nt, Homo sapiens
  source 1..20: mol_type = genomic RNA
tcatcgctgtggtcgtggtc

SEQ ID NO: 13555 - RNA, 20 nt, Homo sapiens
  source 1..20: mol_type = genomic RNA
catcgctgtggtcgtggtct

SEQ ID NO: 13556 - RNA, 20 nt, Homo sapiens
  source 1..20: mol_type = genomic RNA
atcgctgtggtcgtggtctt

SEQ ID NO: 13557 - RNA, 20 nt, Homo sapiens
  source 1..20: mol_type = genomic RNA
tcgctgtggtcgtggtcttc

SEQ ID NO: 13558 - RNA, 20 nt, Homo sapiens
  source 1..20: mol_type = genomic RNA
cgctgtggtcgtggtcttca

SEQ ID NO: 13559 - RNA, 20 nt, Homo sapiens
  source 1..20: mol_type = genomic RNA
gctgtggtcgtggtcttcat

SEQ ID NO: 13560 - RNA, 20 nt, Homo sapiens
  source 1..20: mol_type = genomic RNA
ctgtggtcgtggtcttcata

SEQ ID NO: 13561 - RNA, 20 nt, Homo sapiens
  source 1..20: mol_type = genomic RNA
tgtggtcgtggtcttcatag

SEQ ID NO: 13562 - RNA, 20 nt, Homo sapiens
  source 1..20: mol_type = genomic RNA
gtggtcgtggtcttcatagt

SEQ ID NO: 13563 - RNA, 20 nt, Homo sapiens
  source 1..20: mol_type = genomic RNA
tggtcgtggtcttcatagtc

SEQ ID NO: 13564 - RNA, 20 nt, Homo sapiens
  source 1..20: mol_type = genomic RNA
ggtcgtggtcttcatagtct

SEQ ID NO: 13565 - RNA, 20 nt, Homo sapiens
  source 1..20: mol_type = genomic RNA
gtcgtggtcttcatagtctt

SEQ ID NO: 13566 - RNA, 20 nt, Homo sapiens
  source 1..20: mol_type = genomic RNA
tcgtggtcttcatagtcttc

SEQ ID NO: 13567 - RNA, 20 nt, Homo sapiens
  source 1..20: mol_type = genomic RNA
cgtggtcttcatagtcttcc

SEQ ID NO: 13568 - RNA, 20 nt, Homo sapiens
  source 1..20: mol_type = genomic RNA
gtggtcttcatagtcttcca

SEQ ID NO: 13569 - RNA, 20 nt, Homo sapiens
  source 1..20: mol_type = genomic RNA
tggtcttcatagtcttccag

SEQ ID NO: 13570 - RNA, 20 nt, Homo sapiens
  source 1..20: mol_type = genomic RNA
ggtcttcatagtcttccagc

SEQ ID NO: 13571 - RNA, 20 nt, Homo sapiens
  source 1..20: mol_type = genomic RNA
gtcttcatagtcttccagct

SEQ ID NO: 13572 - RNA, 20 nt, Homo sapiens
  source 1..20: mol_type = genomic RNA
tcttcatagtcttccagctg

SEQ ID NO: 13573 - RNA, 20 nt, Homo sapiens
  source 1..20: mol_type = genomic RNA
cttcatagtcttccagctgc

SEQ ID NO: 13574 - RNA, 20 nt, Homo sapiens
  source 1..20: mol_type = genomic RNA
ttcatagtcttccagctgcc

SEQ ID NO: 13575 - RNA, 20 nt, Homo sapiens
  source 1..20: mol_type = genomic RNA
tcatagtcttccagctgccc

SEQ ID NO: 13576 - RNA, 20 nt, Homo sapiens
  source 1..20: mol_type = genomic RNA
catagtcttccagctgccct

SEQ ID NO: 13577 - RNA, 20 nt, Homo sapiens
  source 1..20: mol_type = genomic RNA
atagtcttccagctgcccta

SEQ ID NO: 13578 - RNA, 20 nt, Homo sapiens
  source 1..20: mol_type = genomic RNA
tagtcttccagctgccctac

SEQ ID NO: 13579 - RNA, 20 nt, Homo sapiens
  source 1..20: mol_type = genomic RNA
agtcttccagctgccctaca

SEQ ID NO: 13580 - RNA, 20 nt, Homo sapiens
  source 1..20: mol_type = genomic RNA
gtcttccagctgccctacaa

SEQ ID NO: 13581 - RNA, 20 nt, Homo sapiens
  source 1..20: mol_type = genomic RNA
tcttccagctgccctacaat

SEQ ID NO: 13582 - RNA, 20 nt, Homo sapiens
  source 1..20: mol_type = genomic RNA
cttccagctgccctacaatg

SEQ ID NO: 13583 - RNA, 20 nt, Homo sapiens
  source 1..20: mol_type = genomic RNA
ttccagctgccctacaatgg

SEQ ID NO: 13584 - RNA, 20 nt, Homo sapiens
  source 1..20: mol_type = genomic RNA
tccagctgccctacaatggg

SEQ ID NO: 13585 - RNA, 20 nt, Homo sapiens
  source 1..20: mol_type = genomic RNA
ccagctgccctacaatgggg

SEQ ID NO: 13586 - RNA, 20 nt, Homo sapiens
  source 1..20: mol_type = genomic RNA
cagctgccctacaatggggt

SEQ ID NO: 13587 - RNA, 20 nt, Homo sapiens
  source 1..20: mol_type = genomic RNA
agctgccctacaatggggtg

SEQ ID NO: 13588 - RNA, 20 nt, Homo sapiens
  source 1..20: mol_type = genomic RNA
gctgccctacaatggggtgg

SEQ ID NO: 13589 - RNA, 20 nt, Homo sapiens
  source 1..20: mol_type = genomic RNA
ctgccctacaatggggtggt

SEQ ID NO: 13590 - RNA, 20 nt, Homo sapiens
  source 1..20: mol_type = genomic RNA
tgccctacaatggggtggtc

SEQ ID NO: 13591 - RNA, 20 nt, Homo sapiens
  source 1..20: mol_type = genomic RNA
gccctacaatggggtggtcc

SEQ ID NO: 13592 - RNA, 20 nt, Homo sapiens
  source 1..20: mol_type = genomic RNA
ccctacaatggggtggtcct

SEQ ID NO: 13593 - RNA, 20 nt, Homo sapiens
  source 1..20: mol_type = genomic RNA
cctacaatggggtggtcctg

SEQ ID NO: 13594 - RNA, 20 nt, Homo sapiens
  source 1..20: mol_type = genomic RNA
ctacaatggggtggtcctgg

SEQ ID NO: 13595 - RNA, 20 nt, Homo sapiens
  source 1..20: mol_type = genomic RNA
tacaatggggtggtcctggc

SEQ ID NO: 13596 - RNA, 20 nt, Homo sapiens
  source 1..20: mol_type = genomic RNA
acaatggggtggtcctggcc

SEQ ID NO: 13597 - RNA, 20 nt, Homo sapiens
  source 1..20: mol_type = genomic RNA
caatggggtggtcctggccc

SEQ ID NO: 13598 - RNA, 20 nt, Homo sapiens
  source 1..20: mol_type = genomic RNA
aatggggtggtcctggccca

SEQ ID NO: 13599 - RNA, 20 nt, Homo sapiens
  source 1..20: mol_type = genomic RNA
atggggtggtcctggcccag

SEQ ID NO: 13600 - RNA, 20 nt, Homo sapiens
  source 1..20: mol_type = genomic RNA
tggggtggtcctggcccaga

SEQ ID NO: 13601 - RNA, 20 nt, Homo sapiens
  source 1..20: mol_type = genomic RNA
ggggtggtcctggcccagac

SEQ ID NO: 13602 - RNA, 20 nt, Homo sapiens
  source 1..20: mol_type = genomic RNA
gggtggtcctggcccagacg

SEQ ID NO: 13603 - RNA, 20 nt, Homo sapiens
  source 1..20: mol_type = genomic RNA
ggtggtcctggcccagacgg

SEQ ID NO: 13604 - RNA, 20 nt, Homo sapiens
  source 1..20: mol_type = genomic RNA
gtggtcctggcccagacggt

SEQ ID NO: 13605 - RNA, 20 nt, Homo sapiens
  source 1..20: mol_type = genomic RNA
tggtcctggcccagacggtg

SEQ ID NO: 13606 - RNA, 20 nt, Homo sapiens
  source 1..20: mol_type = genomic RNA
ggtcctggcccagacggtgg

SEQ ID NO: 13607 - RNA, 20 nt, Homo sapiens
  source 1..20: mol_type = genomic RNA
gtcctggcccagacggtggc

SEQ ID NO: 13608 - RNA, 20 nt, Homo sapiens
  source 1..20: mol_type = genomic RNA
tcctggcccagacggtggcc

SEQ ID NO: 13609 - RNA, 20 nt, Homo sapiens
  source 1..20: mol_type = genomic RNA
cctggcccagacggtggcca

SEQ ID NO: 13610 - RNA, 20 nt, Homo sapiens
  source 1..20: mol_type = genomic RNA
ctggcccagacggtggccaa

SEQ ID NO: 13611 - RNA, 20 nt, Homo sapiens
  source 1..20: mol_type = genomic RNA
tggcccagacggtggccaac

SEQ ID NO: 13612 - RNA, 20 nt, Homo sapiens
  source 1..20: mol_type = genomic RNA
ggcccagacggtggccaact

SEQ ID NO: 13613 - RNA, 20 nt, Homo sapiens
  source 1..20: mol_type = genomic RNA
gcccagacggtggccaactt

SEQ ID NO: 13614 - RNA, 20 nt, Homo sapiens
  source 1..20: mol_type = genomic RNA
cccagacggtggccaacttc

SEQ ID NO: 13615 - RNA, 20 nt, Homo sapiens
  source 1..20: mol_type = genomic RNA
ccagacggtggccaacttca

SEQ ID NO: 13616 - RNA, 20 nt, Homo sapiens
  source 1..20: mol_type = genomic RNA
cagacggtggccaacttcaa

SEQ ID NO: 13617 - RNA, 20 nt, Homo sapiens
  source 1..20: mol_type = genomic RNA
agacggtggccaacttcaac

SEQ ID NO: 13618 - RNA, 20 nt, Homo sapiens
  source 1..20: mol_type = genomic RNA
gacggtggccaacttcaaca

SEQ ID NO: 13619 - RNA, 20 nt, Homo sapiens
  source 1..20: mol_type = genomic RNA
acggtggccaacttcaacat

SEQ ID NO: 13620 - RNA, 20 nt, Homo sapiens
  source 1..20: mol_type = genomic RNA
cggtggccaacttcaacatc

SEQ ID NO: 13621 - RNA, 20 nt, Homo sapiens
  source 1..20: mol_type = genomic RNA
ggtggccaacttcaacatca

SEQ ID NO: 13622 - RNA, 20 nt, Homo sapiens
  source 1..20: mol_type = genomic RNA
gtggccaacttcaacatcac

SEQ ID NO: 13623 - RNA, 20 nt, Homo sapiens
  source 1..20: mol_type = genomic RNA
tggccaacttcaacatcacc

SEQ ID NO: 13624 - RNA, 20 nt, Homo sapiens
  source 1..20: mol_type = genomic RNA
ggccaacttcaacatcacca

SEQ ID NO: 13625 - RNA, 20 nt, Homo sapiens
  source 1..20: mol_type = genomic RNA
gccaacttcaacatcaccag

SEQ ID NO: 13626 - RNA, 20 nt, Homo sapiens
  source 1..20: mol_type = genomic RNA
ccaacttcaacatcaccagt

SEQ ID NO: 13627 - RNA, 20 nt, Homo sapiens
  source 1..20: mol_type = genomic RNA
caacttcaacatcaccagta

SEQ ID NO: 13628 - RNA, 20 nt, Homo sapiens
  source 1..20: mol_type = genomic RNA
aacttcaacatcaccagtag

SEQ ID NO: 13629 - RNA, 20 nt, Homo sapiens
  source 1..20: mol_type = genomic RNA
acttcaacatcaccagtagc

SEQ ID NO: 13630 - RNA, 20 nt, Homo sapiens
  source 1..20: mol_type = genomic RNA
cttcaacatcaccagtagca

SEQ ID NO: 13631 - RNA, 20 nt, Homo sapiens
  source 1..20: mol_type = genomic RNA
ttcaacatcaccagtagcac

SEQ ID NO: 13632 - RNA, 20 nt, Homo sapiens
  source 1..20: mol_type = genomic RNA
tcaacatcaccagtagcacc

SEQ ID NO: 13633 - RNA, 20 nt, Homo sapiens
  source 1..20: mol_type = genomic RNA
caacatcaccagtagcacct

SEQ ID NO: 13634 - RNA, 20 nt, Homo sapiens
  source 1..20: mol_type = genomic RNA
aacatcaccagtagcacctg

SEQ ID NO: 13635 - RNA, 20 nt, Homo sapiens
  source 1..20: mol_type = genomic RNA
acatcaccagtagcacctgt

SEQ ID NO: 13636 - RNA, 20 nt, Homo sapiens
  source 1..20: mol_type = genomic RNA
catcaccagtagcacctgtg

SEQ ID NO: 13637 - RNA, 20 nt, Homo sapiens
  source 1..20: mol_type = genomic RNA
atcaccagtagcacctgtga

SEQ ID NO: 13638 - RNA, 20 nt, Homo sapiens
  source 1..20: mol_type = genomic RNA
tcaccagtagcacctgtgag

SEQ ID NO: 13639 - RNA, 20 nt, Homo sapiens
  source 1..20: mol_type = genomic RNA
caccagtagcacctgtgagc

SEQ ID NO: 13640 - RNA, 20 nt, Homo sapiens
  source 1..20: mol_type = genomic RNA
accagtagcacctgtgagct

SEQ ID NO: 13641 - RNA, 20 nt, Homo sapiens
  source 1..20: mol_type = genomic RNA
ccagtagcacctgtgagctc

SEQ ID NO: 13642 - RNA, 20 nt, Homo sapiens
  source 1..20: mol_type = genomic RNA
cagtagcacctgtgagctca

SEQ ID NO: 13643 - RNA, 20 nt, Homo sapiens
  source 1..20: mol_type = genomic RNA
agtagcacctgtgagctcag

SEQ ID NO: 13644 - RNA, 20 nt, Homo sapiens
  source 1..20: mol_type = genomic RNA
gtagcacctgtgagctcagt

SEQ ID NO: 13645 - RNA, 20 nt, Homo sapiens
  source 1..20: mol_type = genomic RNA
tagcacctgtgagctcagta

SEQ ID NO: 13646 - RNA, 20 nt, Homo sapiens
  source 1..20: mol_type = genomic RNA
agcacctgtgagctcagtaa

SEQ ID NO: 13647 - RNA, 20 nt, Homo sapiens
  source 1..20: mol_type = genomic RNA
gcacctgtgagctcagtaag

SEQ ID NO: 13648 - RNA, 20 nt, Homo sapiens
  source 1..20: mol_type = genomic RNA
cacctgtgagctcagtaagc

SEQ ID NO: 13649 - RNA, 20 nt, Homo sapiens
  source 1..20: mol_type = genomic RNA
acctgtgagctcagtaagca

SEQ ID NO: 13650 - RNA, 20 nt, Homo sapiens
  source 1..20: mol_type = genomic RNA
cctgtgagctcagtaagcaa

SEQ ID NO: 13651 - RNA, 20 nt, Homo sapiens
  source 1..20: mol_type = genomic RNA
ctgtgagctcagtaagcaac

SEQ ID NO: 13652 - RNA, 20 nt, Homo sapiens
  source 1..20: mol_type = genomic RNA
tgtgagctcagtaagcaact

SEQ ID NO: 13653 - RNA, 20 nt, Homo sapiens
  source 1..20: mol_type = genomic RNA
gtgagctcagtaagcaactc

SEQ ID NO: 13654 - RNA, 20 nt, Homo sapiens
  source 1..20: mol_type = genomic RNA
tgagctcagtaagcaactca

SEQ ID NO: 13655 - RNA, 20 nt, Homo sapiens
  source 1..20: mol_type = genomic RNA
gagctcagtaagcaactcaa

SEQ ID NO: 13656 - RNA, 20 nt, Homo sapiens
  source 1..20: mol_type = genomic RNA
agctcagtaagcaactcaac

SEQ ID NO: 13657 - RNA, 20 nt, Homo sapiens
  source 1..20: mol_type = genomic RNA
gctcagtaagcaactcaaca

SEQ ID NO: 13658 - RNA, 20 nt, Homo sapiens
  source 1..20: mol_type = genomic RNA
ctcagtaagcaactcaacat

SEQ ID NO: 13659 - RNA, 20 nt, Homo sapiens
  source 1..20: mol_type = genomic RNA
tcagtaagcaactcaacatc

SEQ ID NO: 13660 - RNA, 20 nt, Homo sapiens
  source 1..20: mol_type = genomic RNA
cagtaagcaactcaacatcg

SEQ ID NO: 13661 - RNA, 20 nt, Homo sapiens
  source 1..20: mol_type = genomic RNA
agtaagcaactcaacatcgc

SEQ ID NO: 13662 - RNA, 20 nt, Homo sapiens
  source 1..20: mol_type = genomic RNA
gtaagcaactcaacatcgcc

SEQ ID NO: 13663 - RNA, 20 nt, Homo sapiens
  source 1..20: mol_type = genomic RNA
taagcaactcaacatcgcct

SEQ ID NO: 13664 - RNA, 20 nt, Homo sapiens
  source 1..20: mol_type = genomic RNA
aagcaactcaacatcgccta

SEQ ID NO: 13665 - RNA, 20 nt, Homo sapiens
  source 1..20: mol_type = genomic RNA
agcaactcaacatcgcctac

SEQ ID NO: 13666 - RNA, 20 nt, Homo sapiens
  source 1..20: mol_type = genomic RNA
gcaactcaacatcgcctacg

SEQ ID NO: 13667 - RNA, 20 nt, Homo sapiens
  source 1..20: mol_type = genomic RNA
caactcaacatcgcctacga

SEQ ID NO: 13668 - RNA, 20 nt, Homo sapiens
  source 1..20: mol_type = genomic RNA
aactcaacatcgcctacgac

SEQ ID NO: 13669 - RNA, 20 nt, Homo sapiens
  source 1..20: mol_type = genomic RNA
actcaacatcgcctacgacg

SEQ ID NO: 13670 - RNA, 20 nt, Homo sapiens
  source 1..20: mol_type = genomic RNA
ctcaacatcgcctacgacgt

SEQ ID NO: 13671 - RNA, 20 nt, Homo sapiens
  source 1..20: mol_type = genomic RNA
tcaacatcgcctacgacgtc

SEQ ID NO: 13672 - RNA, 20 nt, Homo sapiens
  source 1..20: mol_type = genomic RNA
caacatcgcctacgacgtca

SEQ ID NO: 13673 - RNA, 20 nt, Homo sapiens
  source 1..20: mol_type = genomic RNA
aacatcgcctacgacgtcac

SEQ ID NO: 13674 - RNA, 20 nt, Homo sapiens
  source 1..20: mol_type = genomic RNA
acatcgcctacgacgtcacc

SEQ ID NO: 13675 - RNA, 20 nt, Homo sapiens
  source 1..20: mol_type = genomic RNA
catcgcctacgacgtcacct

SEQ ID NO: 13676 - RNA, 20 nt, Homo sapiens
  source 1..20: mol_type = genomic RNA
atcgcctacgacgtcaccta

SEQ ID NO: 13677 - RNA, 20 nt, Homo sapiens
  source 1..20: mol_type = genomic RNA
tcgcctacgacgtcacctac

SEQ ID NO: 13678 - RNA, 20 nt, Homo sapiens
  source 1..20: mol_type = genomic RNA
cgcctacgacgtcacctaca

SEQ ID NO: 13679 - RNA, 20 nt, Homo sapiens
  source 1..20: mol_type = genomic RNA
gcctacgacgtcacctacag

SEQ ID NO: 13680 - RNA, 20 nt, Homo sapiens
  source 1..20: mol_type = genomic RNA
cctacgacgtcacctacagc

SEQ ID NO: 13681 - RNA, 20 nt, Homo sapiens
  source 1..20: mol_type = genomic RNA
ctacgacgtcacctacagcc

SEQ ID NO: 13682 - RNA, 20 nt, Homo sapiens
  source 1..20: mol_type = genomic RNA
tacgacgtcacctacagcct

SEQ ID NO: 13683 - RNA, 20 nt, Homo sapiens
  source 1..20: mol_type = genomic RNA
acgacgtcacctacagcctg

SEQ ID NO: 13684 - RNA, 20 nt, Homo sapiens
  source 1..20: mol_type = genomic RNA
cgacgtcacctacagcctgg

SEQ ID NO: 13685 - RNA, 20 nt, Homo sapiens
  source 1..20: mol_type = genomic RNA
gacgtcacctacagcctggc

SEQ ID NO: 13686 - RNA, 20 nt, Homo sapiens
  source 1..20: mol_type = genomic RNA
acgtcacctacagcctggcc

SEQ ID NO: 13687 - RNA, 20 nt, Homo sapiens
  source 1..20: mol_type = genomic RNA
cgtcacctacagcctggcct

SEQ ID NO: 13688 - RNA, 20 nt, Homo sapiens
  source 1..20: mol_type = genomic RNA
gtcacctacagcctggcctg

SEQ ID NO: 13689 - RNA, 20 nt, Homo sapiens
  source 1..20: mol_type = genomic RNA
tcacctacagcctggcctgc

SEQ ID NO: 13690 - RNA, 20 nt, Homo sapiens
  source 1..20: mol_type = genomic RNA
cacctacagcctggcctgcg

SEQ ID NO: 13691 - RNA, 20 nt, Homo sapiens
  source 1..20: mol_type = genomic RNA
acctacagcctggcctgcgt

SEQ ID NO: 13692 - RNA, 20 nt, Homo sapiens
  source 1..20: mol_type = genomic RNA
cctacagcctggcctgcgtc

SEQ ID NO: 13693 - RNA, 20 nt, Homo sapiens
  source 1..20: mol_type = genomic RNA
ctacagcctggcctgcgtcc

SEQ ID NO: 13694 - RNA, 20 nt, Homo sapiens
  source 1..20: mol_type = genomic RNA
tacagcctggcctgcgtccg

SEQ ID NO: 13695 - RNA, 20 nt, Homo sapiens
  source 1..20: mol_type = genomic RNA
acagcctggcctgcgtccgc

SEQ ID NO: 13696 - RNA, 20 nt, Homo sapiens
  source 1..20: mol_type = genomic RNA
cagcctggcctgcgtccgct

SEQ ID NO: 13697 - RNA, 20 nt, Homo sapiens
  source 1..20: mol_type = genomic RNA
agcctggcctgcgtccgctg

SEQ ID NO: 13698 - RNA, 20 nt, Homo sapiens
  source 1..20: mol_type = genomic RNA
gcctggcctgcgtccgctgc

SEQ ID NO: 13699 - RNA, 20 nt, Homo sapiens
  source 1..20: mol_type = genomic RNA
cctggcctgcgtccgctgct

SEQ ID NO: 13700 - RNA, 20 nt, Homo sapiens
  source 1..20: mol_type = genomic RNA
ctggcctgcgtccgctgctg

SEQ ID NO: 13701 - RNA, 20 nt, Homo sapiens
  source 1..20: mol_type = genomic RNA
tggcctgcgtccgctgctgc

SEQ ID NO: 13702 - RNA, 20 nt, Homo sapiens
  source 1..20: mol_type = genomic RNA
ggcctgcgtccgctgctgcg

SEQ ID NO: 13703 - RNA, 20 nt, Homo sapiens
  source 1..20: mol_type = genomic RNA
gcctgcgtccgctgctgcgt

SEQ ID NO: 13704 - RNA, 20 nt, Homo sapiens
  source 1..20: mol_type = genomic RNA
cctgcgtccgctgctgcgtc

SEQ ID NO: 13705 - RNA, 20 nt, Homo sapiens
  source 1..20: mol_type = genomic RNA
ctgcgtccgctgctgcgtca

SEQ ID NO: 13706 - RNA, 20 nt, Homo sapiens
  source 1..20: mol_type = genomic RNA
tgcgtccgctgctgcgtcaa

SEQ ID NO: 13707 - RNA, 20 nt, Homo sapiens
  source 1..20: mol_type = genomic RNA
gcgtccgctgctgcgtcaac

SEQ ID NO: 13708 - RNA, 20 nt, Homo sapiens
  source 1..20: mol_type = genomic RNA
cgtccgctgctgcgtcaacc

SEQ ID NO: 13709 - RNA, 20 nt, Homo sapiens
  source 1..20: mol_type = genomic RNA
gtccgctgctgcgtcaaccc

SEQ ID NO: 13710 - RNA, 20 nt, Homo sapiens
  source 1..20: mol_type = genomic RNA
tccgctgctgcgtcaaccct

SEQ ID NO: 13711 - RNA, 20 nt, Homo sapiens
  source 1..20: mol_type = genomic RNA
ccgctgctgcgtcaaccctt

SEQ ID NO: 13712 - RNA, 20 nt, Homo sapiens
  source 1..20: mol_type = genomic RNA
cgctgctgcgtcaacccttt

SEQ ID NO: 13713 - RNA, 20 nt, Homo sapiens
  source 1..20: mol_type = genomic RNA
gctgctgcgtcaaccctttc

SEQ ID NO: 13714 - RNA, 20 nt, Homo sapiens
  source 1..20: mol_type = genomic RNA
ctgctgcgtcaaccctttct

SEQ ID NO: 13715 - RNA, 20 nt, Homo sapiens
  source 1..20: mol_type = genomic RNA
tgctgcgtcaaccctttctt

SEQ ID NO: 13716 - RNA, 20 nt, Homo sapiens
  source 1..20: mol_type = genomic RNA
gctgcgtcaaccctttcttg

SEQ ID NO: 13717 - RNA, 20 nt, Homo sapiens
  source 1..20: mol_type = genomic RNA
ctgcgtcaaccctttcttgt

SEQ ID NO: 13718 - RNA, 20 nt, Homo sapiens
  source 1..20: mol_type = genomic RNA
tgcgtcaaccctttcttgta

SEQ ID NO: 13719 - RNA, 20 nt, Homo sapiens
  source 1..20: mol_type = genomic RNA
gcgtcaaccctttcttgtac

SEQ ID NO: 13720 - RNA, 20 nt, Homo sapiens
  source 1..20: mol_type = genomic RNA
cgtcaaccctttcttgtacg

SEQ ID NO: 13721 - RNA, 20 nt, Homo sapiens
  source 1..20: mol_type = genomic RNA
gtcaaccctttcttgtacgc

SEQ ID NO: 13722 - RNA, 20 nt, Homo sapiens
  source 1..20: mol_type = genomic RNA
tcaaccctttcttgtacgcc

SEQ ID NO: 13723 - RNA, 20 nt, Homo sapiens
  source 1..20: mol_type = genomic RNA
caaccctttcttgtacgcct

SEQ ID NO: 13724 - RNA, 20 nt, Homo sapiens
  source 1..20: mol_type = genomic RNA
aaccctttcttgtacgcctt

SEQ ID NO: 13725 - RNA, 20 nt, Homo sapiens
  source 1..20: mol_type = genomic RNA
accctttcttgtacgccttc

SEQ ID NO: 13726 - RNA, 20 nt, Homo sapiens
  source 1..20: mol_type = genomic RNA
ccctttcttgtacgccttca

SEQ ID NO: 13727 - RNA, 20 nt, Homo sapiens
  source 1..20: mol_type = genomic RNA
cctttcttgtacgccttcat

SEQ ID NO: 13728 - RNA, 20 nt, Homo sapiens
  source 1..20: mol_type = genomic RNA
ctttcttgtacgccttcatc

SEQ ID NO: 13729 - RNA, 20 nt, Homo sapiens
  source 1..20: mol_type = genomic RNA
tttcttgtacgccttcatcg

SEQ ID NO: 13730 - RNA, 20 nt, Homo sapiens
  source 1..20: mol_type = genomic RNA
ttcttgtacgccttcatcgg

SEQ ID NO: 13731 - RNA, 20 nt, Homo sapiens
  source 1..20: mol_type = genomic RNA
tcttgtacgccttcatcggc

SEQ ID NO: 13732 - RNA, 20 nt, Homo sapiens
  source 1..20: mol_type = genomic RNA
cttgtacgccttcatcggcg

SEQ ID NO: 13733 - RNA, 20 nt, Homo sapiens
  source 1..20: mol_type = genomic RNA
ttgtacgccttcatcggcgt

SEQ ID NO: 13734 - RNA, 20 nt, Homo sapiens
  source 1..20: mol_type = genomic RNA
tgtacgccttcatcggcgtc

SEQ ID NO: 13735 - RNA, 20 nt, Homo sapiens
  source 1..20: mol_type = genomic RNA
gtacgccttcatcggcgtca

SEQ ID NO: 13736 - RNA, 20 nt, Homo sapiens
  source 1..20: mol_type = genomic RNA
tacgccttcatcggcgtcaa

SEQ ID NO: 13737 - RNA, 20 nt, Homo sapiens
  source 1..20: mol_type = genomic RNA
acgccttcatcggcgtcaag

SEQ ID NO: 13738 - RNA, 20 nt, Homo sapiens
  source 1..20: mol_type = genomic RNA
cgccttcatcggcgtcaagt

SEQ ID NO: 13739 - RNA, 20 nt, Homo sapiens
  source 1..20: mol_type = genomic RNA
gccttcatcggcgtcaagtt

SEQ ID NO: 13740 - RNA, 20 nt, Homo sapiens
  source 1..20: mol_type = genomic RNA
ccttcatcggcgtcaagttc

SEQ ID NO: 13741 - RNA, 20 nt, Homo sapiens
  source 1..20: mol_type = genomic RNA
cttcatcggcgtcaagttcc

SEQ ID NO: 13742 - RNA, 20 nt, Homo sapiens
  source 1..20: mol_type = genomic RNA
ttcatcggcgtcaagttccg

SEQ ID NO: 13743 - RNA, 20 nt, Homo sapiens
  source 1..20: mol_type = genomic RNA
tcatcggcgtcaagttccgc

SEQ ID NO: 13744 - RNA, 20 nt, Homo sapiens
  source 1..20: mol_type = genomic RNA
catcggcgtcaagttccgca

SEQ ID NO: 13745 - RNA, 20 nt, Homo sapiens
  source 1..20: mol_type = genomic RNA
atcggcgtcaagttccgcaa

SEQ ID NO: 13746 - RNA, 20 nt, Homo sapiens
  source 1..20: mol_type = genomic RNA
tcggcgtcaagttccgcaac

SEQ ID NO: 13747 - RNA, 20 nt, Homo sapiens
  source 1..20: mol_type = genomic RNA
cggcgtcaagttccgcaacg

SEQ ID NO: 13748 - RNA, 20 nt, Homo sapiens
  source 1..20: mol_type = genomic RNA
ggcgtcaagttccgcaacga

SEQ ID NO: 13749 - RNA, 20 nt, Homo sapiens
  source 1..20: mol_type = genomic RNA
gcgtcaagttccgcaacgat

SEQ ID NO: 13750 - RNA, 20 nt, Homo sapiens
  source 1..20: mol_type = genomic RNA
cgtcaagttccgcaacgatc

SEQ ID NO: 13751 - RNA, 20 nt, Homo sapiens
  source 1..20: mol_type = genomic RNA
gtcaagttccgcaacgatct

SEQ ID NO: 13752 - RNA, 20 nt, Homo sapiens
  source 1..20: mol_type = genomic RNA
tcaagttccgcaacgatctc

SEQ ID NO: 13753 - RNA, 20 nt, Homo sapiens
  source 1..20: mol_type = genomic RNA
caagttccgcaacgatctct

SEQ ID NO: 13754 - RNA, 20 nt, Homo sapiens
  source 1..20: mol_type = genomic RNA
aagttccgcaacgatctctt

SEQ ID NO: 13755 - RNA, 20 nt, Homo sapiens
  source 1..20: mol_type = genomic RNA
agttccgcaacgatctcttc

SEQ ID NO: 13756 - RNA, 20 nt, Homo sapiens
  source 1..20: mol_type = genomic RNA
gttccgcaacgatctcttca

SEQ ID NO: 13757 - RNA, 20 nt, Homo sapiens
  source 1..20: mol_type = genomic RNA
ttccgcaacgatctcttcaa

SEQ ID NO: 13758 - RNA, 20 nt, Homo sapiens
  source 1..20: mol_type = genomic RNA
tccgcaacgatctcttcaag

SEQ ID NO: 13759 - RNA, 20 nt, Homo sapiens
  source 1..20: mol_type = genomic RNA
ccgcaacgatctcttcaagc

SEQ ID NO: 13760 - RNA, 20 nt, Homo sapiens
  source 1..20: mol_type = genomic RNA
cgcaacgatctcttcaagct

SEQ ID NO: 13761 - RNA, 20 nt, Homo sapiens
  source 1..20: mol_type = genomic RNA
gcaacgatctcttcaagctc

SEQ ID NO: 13762 - RNA, 20 nt, Homo sapiens
  source 1..20: mol_type = genomic RNA
caacgatctcttcaagctct

SEQ ID NO: 13763 - RNA, 20 nt, Homo sapiens
  source 1..20: mol_type = genomic RNA
aacgatctcttcaagctctt

SEQ ID NO: 13764 - RNA, 20 nt, Homo sapiens
  source 1..20: mol_type = genomic RNA
acgatctcttcaagctcttc

SEQ ID NO: 13765 - RNA, 20 nt, Homo sapiens
  source 1..20: mol_type = genomic RNA
cgatctcttcaagctcttca

SEQ ID NO: 13766 - RNA, 20 nt, Homo sapiens
  source 1..20: mol_type = genomic RNA
gatctcttcaagctcttcaa

SEQ ID NO: 13767 - RNA, 20 nt, Homo sapiens
  source 1..20: mol_type = genomic RNA
atctcttcaagctcttcaag

SEQ ID NO: 13768 - RNA, 20 nt, Homo sapiens
  source 1..20: mol_type = genomic RNA
tctcttcaagctcttcaagg

SEQ ID NO: 13769 - RNA, 20 nt, Homo sapiens
  source 1..20: mol_type = genomic RNA
ctcttcaagctcttcaagga

SEQ ID NO: 13770 - RNA, 20 nt, Homo sapiens
  source 1..20: mol_type = genomic RNA
tcttcaagctcttcaaggac

SEQ ID NO: 13771 - RNA, 20 nt, Homo sapiens
  source 1..20: mol_type = genomic RNA
cttcaagctcttcaaggacc

SEQ ID NO: 13772 - RNA, 20 nt, Homo sapiens
  source 1..20: mol_type = genomic RNA
ttcaagctcttcaaggacct

SEQ ID NO: 13773 - RNA, 20 nt, Homo sapiens
  source 1..20: mol_type = genomic RNA
tcaagctcttcaaggacctg

SEQ ID NO: 13774 - RNA, 20 nt, Homo sapiens
  source 1..20: mol_type = genomic RNA
caagctcttcaaggacctgg

SEQ ID NO: 13775 - RNA, 20 nt, Homo sapiens
  source 1..20: mol_type = genomic RNA
aagctcttcaaggacctggg

SEQ ID NO: 13776 - RNA, 20 nt, Homo sapiens
  source 1..20: mol_type = genomic RNA
agctcttcaaggacctgggc

SEQ ID NO: 13777 - RNA, 20 nt, Homo sapiens
  source 1..20: mol_type = genomic RNA
gctcttcaaggacctgggct

SEQ ID NO: 13778 - RNA, 20 nt, Homo sapiens
  source 1..20: mol_type = genomic RNA
ctcttcaaggacctgggctg

SEQ ID NO: 13779 - RNA, 20 nt, Homo sapiens
  source 1..20: mol_type = genomic RNA
tcttcaaggacctgggctgc

SEQ ID NO: 13780 - RNA, 20 nt, Homo sapiens
  source 1..20: mol_type = genomic RNA
cttcaaggacctgggctgcc

SEQ ID NO: 13781 - RNA, 20 nt, Homo sapiens
  source 1..20: mol_type = genomic RNA
ttcaaggacctgggctgcct

SEQ ID NO: 13782 - RNA, 20 nt, Homo sapiens
  source 1..20: mol_type = genomic RNA
tcaaggacctgggctgcctc

SEQ ID NO: 13783 - RNA, 20 nt, Homo sapiens
  source 1..20: mol_type = genomic RNA
caaggacctgggctgcctca

SEQ ID NO: 13784 - RNA, 20 nt, Homo sapiens
  source 1..20: mol_type = genomic RNA
aaggacctgggctgcctcag

SEQ ID NO: 13785 - RNA, 20 nt, Homo sapiens
  source 1..20: mol_type = genomic RNA
aggacctgggctgcctcagc

SEQ ID NO: 13786 - RNA, 20 nt, Homo sapiens
  source 1..20: mol_type = genomic RNA
ggacctgggctgcctcagcc

SEQ ID NO: 13787 - RNA, 20 nt, Homo sapiens
  source 1..20: mol_type = genomic RNA
gacctgggctgcctcagcca

SEQ ID NO: 13788 - RNA, 20 nt, Homo sapiens
  source 1..20: mol_type = genomic RNA
acctgggctgcctcagccag

SEQ ID NO: 13789 - RNA, 20 nt, Homo sapiens
  source 1..20: mol_type = genomic RNA
cctgggctgcctcagccagg

SEQ ID NO: 13790 - RNA, 20 nt, Homo sapiens
  source 1..20: mol_type = genomic RNA
ctgggctgcctcagccagga

SEQ ID NO: 13791 - RNA, 20 nt, Homo sapiens
  source 1..20: mol_type = genomic RNA
tgggctgcctcagccaggag

SEQ ID NO: 13792 - RNA, 20 nt, Homo sapiens
  source 1..20: mol_type = genomic RNA
gggctgcctcagccaggagc

SEQ ID NO: 13793 - RNA, 20 nt, Homo sapiens
  source 1..20: mol_type = genomic RNA
ggctgcctcagccaggagca

SEQ ID NO: 13794 - RNA, 20 nt, Homo sapiens
  source 1..20: mol_type = genomic RNA
gctgcctcagccaggagcag

SEQ ID NO: 13795 - RNA, 20 nt, Homo sapiens
  source 1..20: mol_type = genomic RNA
ctgcctcagccaggagcagc

SEQ ID NO: 13796 - RNA, 20 nt, Homo sapiens
  source 1..20: mol_type = genomic RNA
tgcctcagccaggagcagct

SEQ ID NO: 13797 - RNA, 20 nt, Homo sapiens
  source 1..20: mol_type = genomic RNA
gcctcagccaggagcagctc

SEQ ID NO: 13798 - RNA, 20 nt, Homo sapiens
  source 1..20: mol_type = genomic RNA
cctcagccaggagcagctcc

SEQ ID NO: 13799 - RNA, 20 nt, Homo sapiens
  source 1..20: mol_type = genomic RNA
ctcagccaggagcagctccg

SEQ ID NO: 13800 - RNA, 20 nt, Homo sapiens
  source 1..20: mol_type = genomic RNA
tcagccaggagcagctccgg

SEQ ID NO: 13801 - RNA, 20 nt, Homo sapiens
  source 1..20: mol_type = genomic RNA
cagccaggagcagctccggc

SEQ ID NO: 13802 - RNA, 20 nt, Homo sapiens
  source 1..20: mol_type = genomic RNA
agccaggagcagctccggca

SEQ ID NO: 13803 - RNA, 20 nt, Homo sapiens
  source 1..20: mol_type = genomic RNA
gccaggagcagctccggcag

SEQ ID NO: 13804 - RNA, 20 nt, Homo sapiens
  source 1..20: mol_type = genomic RNA
ccaggagcagctccggcagt

SEQ ID NO: 13805 - RNA, 20 nt, Homo sapiens
  source 1..20: mol_type = genomic RNA
caggagcagctccggcagtg

SEQ ID NO: 13806 - RNA, 20 nt, Homo sapiens
  source 1..20: mol_type = genomic RNA
aggagcagctccggcagtgg

SEQ ID NO: 13807 - RNA, 20 nt, Homo sapiens
  source 1..20: mol_type = genomic RNA
ggagcagctccggcagtggt

SEQ ID NO: 13808 - RNA, 20 nt, Homo sapiens
  source 1..20: mol_type = genomic RNA
gagcagctccggcagtggtc

SEQ ID NO: 13809 - RNA, 20 nt, Homo sapiens
  source 1..20: mol_type = genomic RNA
agcagctccggcagtggtct

SEQ ID NO: 13810 - RNA, 20 nt, Homo sapiens
  source 1..20: mol_type = genomic RNA
gcagctccggcagtggtctt

SEQ ID NO: 13811 - RNA, 20 nt, Homo sapiens
  source 1..20: mol_type = genomic RNA
cagctccggcagtggtcttc

SEQ ID NO: 13812 - RNA, 20 nt, Homo sapiens
  source 1..20: mol_type = genomic RNA
agctccggcagtggtcttcc

SEQ ID NO: 13813 - RNA, 20 nt, Homo sapiens
  source 1..20: mol_type = genomic RNA
gctccggcagtggtcttcct

SEQ ID NO: 13814 - RNA, 20 nt, Homo sapiens
  source 1..20: mol_type = genomic RNA
ctccggcagtggtcttcctg

SEQ ID NO: 13815 - RNA, 20 nt, Homo sapiens
  source 1..20: mol_type = genomic RNA
tccggcagtggtcttcctgt

SEQ ID NO: 13816 - RNA, 20 nt, Homo sapiens
  source 1..20: mol_type = genomic RNA
ccggcagtggtcttcctgtc

SEQ ID NO: 13817 - RNA, 20 nt, Homo sapiens
  source 1..20: mol_type = genomic RNA
cggcagtggtcttcctgtcg

SEQ ID NO: 13818 - RNA, 20 nt, Homo sapiens
  source 1..20: mol_type = genomic RNA
ggcagtggtcttcctgtcgg

SEQ ID NO: 13819 - RNA, 20 nt, Homo sapiens
  source 1..20: mol_type = genomic RNA
gcagtggtcttcctgtcggc

SEQ ID NO: 13820 - RNA, 20 nt, Homo sapiens
  source 1..20: mol_type = genomic RNA
cagtggtcttcctgtcggca

SEQ ID NO: 13821 - RNA, 20 nt, Homo sapiens
  source 1..20: mol_type = genomic RNA
agtggtcttcctgtcggcac

SEQ ID NO: 13822 - RNA, 20 nt, Homo sapiens
  source 1..20: mol_type = genomic RNA
gtggtcttcctgtcggcaca

SEQ ID NO: 13823 - RNA, 20 nt, Homo sapiens
  source 1..20: mol_type = genomic RNA
tggtcttcctgtcggcacat

SEQ ID NO: 13824 - RNA, 20 nt, Homo sapiens
  source 1..20: mol_type = genomic RNA
ggtcttcctgtcggcacatc

SEQ ID NO: 13825 - RNA, 20 nt, Homo sapiens
  source 1..20: mol_type = genomic RNA
gtcttcctgtcggcacatcc

SEQ ID NO: 13826 - RNA, 20 nt, Homo sapiens
  source 1..20: mol_type = genomic RNA
tcttcctgtcggcacatccg

SEQ ID NO: 13827 - RNA, 20 nt, Homo sapiens
  source 1..20: mol_type = genomic RNA
cttcctgtcggcacatccgg

SEQ ID NO: 13828 - RNA, 20 nt, Homo sapiens
  source 1..20: mol_type = genomic RNA
ttcctgtcggcacatccggc

SEQ ID NO: 13829 - RNA, 20 nt, Homo sapiens
  source 1..20: mol_type = genomic RNA
tcctgtcggcacatccggcg

SEQ ID NO: 13830 - RNA, 20 nt, Homo sapiens
  source 1..20: mol_type = genomic RNA
cctgtcggcacatccggcgc

SEQ ID NO: 13831 - RNA, 20 nt, Homo sapiens
  source 1..20: mol_type = genomic RNA
ctgtcggcacatccggcgct

SEQ ID NO: 13832 - RNA, 20 nt, Homo sapiens
  source 1..20: mol_type = genomic RNA
tgtcggcacatccggcgctc

SEQ ID NO: 13833 - RNA, 20 nt, Homo sapiens
  source 1..20: mol_type = genomic RNA
gtcggcacatccggcgctcc

SEQ ID NO: 13834 - RNA, 20 nt, Homo sapiens
  source 1..20: mol_type = genomic RNA
tcggcacatccggcgctcct

SEQ ID NO: 13835 - RNA, 20 nt, Homo sapiens
  source 1..20: mol_type = genomic RNA
cggcacatccggcgctcctc

SEQ ID NO: 13836 - RNA, 20 nt, Homo sapiens
  source 1..20: mol_type = genomic RNA
ggcacatccggcgctcctcc

SEQ ID NO: 13837 - RNA, 20 nt, Homo sapiens
  source 1..20: mol_type = genomic RNA
gcacatccggcgctcctcca

SEQ ID NO: 13838 - RNA, 20 nt, Homo sapiens
  source 1..20: mol_type = genomic RNA
cacatccggcgctcctccat

SEQ ID NO: 13839 - RNA, 20 nt, Homo sapiens
  source 1..20: mol_type = genomic RNA
acatccggcgctcctccatg

SEQ ID NO: 13840 - RNA, 20 nt, Homo sapiens
  source 1..20: mol_type = genomic RNA
catccggcgctcctccatga

SEQ ID NO: 13841 - RNA, 20 nt, Homo sapiens
  source 1..20: mol_type = genomic RNA
atccggcgctcctccatgag

SEQ ID NO: 13842 - RNA, 20 nt, Homo sapiens
  source 1..20: mol_type = genomic RNA
tccggcgctcctccatgagt

SEQ ID NO: 13843 - RNA, 20 nt, Homo sapiens
  source 1..20: mol_type = genomic RNA
ccggcgctcctccatgagtg

SEQ ID NO: 13844 - RNA, 20 nt, Homo sapiens
  source 1..20: mol_type = genomic RNA
cggcgctcctccatgagtgt

SEQ ID NO: 13845 - RNA, 20 nt, Homo sapiens
  source 1..20: mol_type = genomic RNA
ggcgctcctccatgagtgtg

SEQ ID NO: 13846 - RNA, 20 nt, Homo sapiens
  source 1..20: mol_type = genomic RNA
gcgctcctccatgagtgtgg

SEQ ID NO: 13847 - RNA, 20 nt, Homo sapiens
  source 1..20: mol_type = genomic RNA
cgctcctccatgagtgtgga

SEQ ID NO: 13848 - RNA, 20 nt, Homo sapiens
  source 1..20: mol_type = genomic RNA
gctcctccatgagtgtggag

SEQ ID NO: 13849 - RNA, 20 nt, Homo sapiens
  source 1..20: mol_type = genomic RNA
ctcctccatgagtgtggagg

SEQ ID NO: 13850 - RNA, 20 nt, Homo sapiens
  source 1..20: mol_type = genomic RNA
tcctccatgagtgtggaggc

SEQ ID NO: 13851 - RNA, 20 nt, Homo sapiens
  source 1..20: mol_type = genomic RNA
cctccatgagtgtggaggcc

SEQ ID NO: 13852 - RNA, 20 nt, Homo sapiens
  source 1..20: mol_type = genomic RNA
ctccatgagtgtggaggccg

SEQ ID NO: 13853 - RNA, 20 nt, Homo sapiens
  source 1..20: mol_type = genomic RNA
tccatgagtgtggaggccga

SEQ ID NO: 13854 - RNA, 20 nt, Homo sapiens
  source 1..20: mol_type = genomic RNA
ccatgagtgtggaggccgag

SEQ ID NO: 13855 - RNA, 20 nt, Homo sapiens
  source 1..20: mol_type = genomic RNA
catgagtgtggaggccgaga

SEQ ID NO: 13856 - RNA, 20 nt, Homo sapiens
  source 1..20: mol_type = genomic RNA
atgagtgtggaggccgagac

SEQ ID NO: 13857 - RNA, 20 nt, Homo sapiens
  source 1..20: mol_type = genomic RNA
tgagtgtggaggccgagacc

SEQ ID NO: 13858 - RNA, 20 nt, Homo sapiens
  source 1..20: mol_type = genomic RNA
gagtgtggaggccgagacca

SEQ ID NO: 13859 - RNA, 20 nt, Homo sapiens
  source 1..20: mol_type = genomic RNA
agtgtggaggccgagaccac

SEQ ID NO: 13860 - RNA, 20 nt, Homo sapiens
  source 1..20: mol_type = genomic RNA
gtgtggaggccgagaccacc

SEQ ID NO: 13861 - RNA, 20 nt, Homo sapiens
  source 1..20: mol_type = genomic RNA
tgtggaggccgagaccacca

SEQ ID NO: 13862 - RNA, 20 nt, Homo sapiens
  source 1..20: mol_type = genomic RNA
gtggaggccgagaccaccac

SEQ ID NO: 13863 - RNA, 20 nt, Homo sapiens
  source 1..20: mol_type = genomic RNA
tggaggccgagaccaccacc

SEQ ID NO: 13864 - RNA, 20 nt, Homo sapiens
  source 1..20: mol_type = genomic RNA
ggaggccgagaccaccacca

SEQ ID NO: 13865 - RNA, 20 nt, Homo sapiens
  source 1..20: mol_type = genomic RNA
gaggccgagaccaccaccac

SEQ ID NO: 13866 - RNA, 20 nt, Homo sapiens
  source 1..20: mol_type = genomic RNA
aggccgagaccaccaccacc

SEQ ID NO: 13867 - RNA, 20 nt, Homo sapiens
  source 1..20: mol_type = genomic RNA
ggccgagaccaccaccacct

SEQ ID NO: 13868 - RNA, 20 nt, Homo sapiens
  source 1..20: mol_type = genomic RNA
gccgagaccaccaccacctt

SEQ ID NO: 13869 - RNA, 20 nt, Homo sapiens
  source 1..20: mol_type = genomic RNA
ccgagaccaccaccaccttc

SEQ ID NO: 13870 - RNA, 20 nt, Homo sapiens
  source 1..20: mol_type = genomic RNA
cgagaccaccaccaccttct

SEQ ID NO: 13871 - RNA, 20 nt, Homo sapiens
  source 1..20: mol_type = genomic RNA
gagaccaccaccaccttctc

SEQ ID NO: 13872 - RNA, 20 nt, Homo sapiens
  source 1..20: mol_type = genomic RNA
agaccaccaccaccttctcc

SEQ ID NO: 13873 - RNA, 20 nt, Homo sapiens
  source 1..20: mol_type = genomic RNA
gaccaccaccaccttctccc

SEQ ID NO: 13874 - RNA, 20 nt, Homo sapiens
  source 1..20: mol_type = genomic RNA
accaccaccaccttctcccc

SEQ ID NO: 13875 - RNA, 20 nt, Homo sapiens
  source 1..20: mol_type = genomic RNA
ccaccaccaccttctcccca

SEQ ID NO: 13876 - RNA, 20 nt, Homo sapiens
  source 1..20: mol_type = genomic RNA
caccaccaccttctccccat

SEQ ID NO: 13877 - RNA, 20 nt, Homo sapiens
  source 1..20: mol_type = genomic RNA
accaccaccttctccccata

SEQ ID NO: 13878 - RNA, 20 nt, Homo sapiens
  source 1..20: mol_type = genomic RNA
ccaccaccttctccccatag

SEQ ID NO: 13879 - RNA, 20 nt, Homo sapiens
  source 1..20: mol_type = genomic RNA
caccaccttctccccatagg

SEQ ID NO: 13880 - RNA, 20 nt, Homo sapiens
  source 1..20: mol_type = genomic RNA
accaccttctccccataggc

SEQ ID NO: 13881 - RNA, 20 nt, Homo sapiens
  source 1..20: mol_type = genomic RNA
ccaccttctccccataggcg

SEQ ID NO: 13882 - RNA, 20 nt, Homo sapiens
  source 1..20: mol_type = genomic RNA
caccttctccccataggcga

SEQ ID NO: 13883 - RNA, 20 nt, Homo sapiens
  source 1..20: mol_type = genomic RNA
accttctccccataggcgac

SEQ ID NO: 13884 - RNA, 20 nt, Homo sapiens
  source 1..20: mol_type = genomic RNA
ccttctccccataggcgact

SEQ ID NO: 13885 - RNA, 20 nt, Homo sapiens
  source 1..20: mol_type = genomic RNA
cttctccccataggcgactc

SEQ ID NO: 13886 - RNA, 20 nt, Homo sapiens
  source 1..20: mol_type = genomic RNA
ttctccccataggcgactct

SEQ ID NO: 13887 - RNA, 20 nt, Homo sapiens
  source 1..20: mol_type = genomic RNA
tctccccataggcgactctt

SEQ ID NO: 13888 - RNA, 20 nt, Homo sapiens
  source 1..20: mol_type = genomic RNA
ctccccataggcgactcttc

SEQ ID NO: 13889 - RNA, 20 nt, Homo sapiens
  source 1..20: mol_type = genomic RNA
tccccataggcgactcttct

SEQ ID NO: 13890 - RNA, 20 nt, Homo sapiens
  source 1..20: mol_type = genomic RNA
ccccataggcgactcttctg

SEQ ID NO: 13891 - RNA, 20 nt, Homo sapiens
  source 1..20: mol_type = genomic RNA
cccataggcgactcttctgc

SEQ ID NO: 13892 - RNA, 20 nt, Homo sapiens
  source 1..20: mol_type = genomic RNA
ccataggcgactcttctgcc

SEQ ID NO: 13893 - RNA, 20 nt, Homo sapiens
  source 1..20: mol_type = genomic RNA
cataggcgactcttctgcct

SEQ ID NO: 13894 - RNA, 20 nt, Homo sapiens
  source 1..20: mol_type = genomic RNA
ataggcgactcttctgcctg

SEQ ID NO: 13895 - RNA, 20 nt, Homo sapiens
  source 1..20: mol_type = genomic RNA
taggcgactcttctgcctgg

SEQ ID NO: 13896 - RNA, 20 nt, Homo sapiens
  source 1..20: mol_type = genomic RNA
aggcgactcttctgcctgga

SEQ ID NO: 13897 - RNA, 20 nt, Homo sapiens
  source 1..20: mol_type = genomic RNA
ggcgactcttctgcctggac

SEQ ID NO: 13898 - RNA, 20 nt, Homo sapiens
  source 1..20: mol_type = genomic RNA
gcgactcttctgcctggact

SEQ ID NO: 13899 - RNA, 20 nt, Homo sapiens
  source 1..20: mol_type = genomic RNA
cgactcttctgcctggacta

SEQ ID NO: 13900 - RNA, 20 nt, Homo sapiens
  source 1..20: mol_type = genomic RNA
gactcttctgcctggactag

SEQ ID NO: 13901 - RNA, 20 nt, Homo sapiens
  source 1..20: mol_type = genomic RNA
actcttctgcctggactaga

SEQ ID NO: 13902 - RNA, 20 nt, Homo sapiens
  source 1..20: mol_type = genomic RNA
ctcttctgcctggactagag

SEQ ID NO: 13903 - RNA, 20 nt, Homo sapiens
  source 1..20: mol_type = genomic RNA
tcttctgcctggactagagg

SEQ ID NO: 13904 - RNA, 20 nt, Homo sapiens
  source 1..20: mol_type = genomic RNA
cttctgcctggactagaggg

SEQ ID NO: 13905 - RNA, 20 nt, Homo sapiens
  source 1..20: mol_type = genomic RNA
ttctgcctggactagaggga

SEQ ID NO: 13906 - RNA, 20 nt, Homo sapiens
  source 1..20: mol_type = genomic RNA
tctgcctggactagagggac

SEQ ID NO: 13907 - RNA, 20 nt, Homo sapiens
  source 1..20: mol_type = genomic RNA
ctgcctggactagagggacc

SEQ ID NO: 13908 - RNA, 20 nt, Homo sapiens
  source 1..20: mol_type = genomic RNA
tgcctggactagagggacct

SEQ ID NO: 13909 - RNA, 20 nt, Homo sapiens
  source 1..20: mol_type = genomic RNA
gcctggactagagggacctc

SEQ ID NO: 13910 - RNA, 20 nt, Homo sapiens
  source 1..20: mol_type = genomic RNA
cctggactagagggacctct

SEQ ID NO: 13911 - RNA, 20 nt, Homo sapiens
  source 1..20: mol_type = genomic RNA
ctggactagagggacctctc

SEQ ID NO: 13912 - RNA, 20 nt, Homo sapiens
  source 1..20: mol_type = genomic RNA
tggactagagggacctctcc

SEQ ID NO: 13913 - RNA, 20 nt, Homo sapiens
  source 1..20: mol_type = genomic RNA
ggactagagggacctctccc

SEQ ID NO: 13914 - RNA, 20 nt, Homo sapiens
  source 1..20: mol_type = genomic RNA
gactagagggacctctccca

SEQ ID NO: 13915 - RNA, 20 nt, Homo sapiens
  source 1..20: mol_type = genomic RNA
actagagggacctctcccag

SEQ ID NO: 13916 - RNA, 20 nt, Homo sapiens
  source 1..20: mol_type = genomic RNA
ctagagggacctctcccagg

SEQ ID NO: 13917 - RNA, 20 nt, Homo sapiens
  source 1..20: mol_type = genomic RNA
tagagggacctctcccaggg

SEQ ID NO: 13918 - RNA, 20 nt, Homo sapiens
  source 1..20: mol_type = genomic RNA
agagggacctctcccagggt

SEQ ID NO: 13919 - RNA, 20 nt, Homo sapiens
  source 1..20: mol_type = genomic RNA
gagggacctctcccagggtc

SEQ ID NO: 13920 - RNA, 20 nt, Homo sapiens
  source 1..20: mol_type = genomic RNA
agggacctctcccagggtcc

SEQ ID NO: 13921 - RNA, 20 nt, Homo sapiens
  source 1..20: mol_type = genomic RNA
gggacctctcccagggtccc

SEQ ID NO: 13922 - RNA, 20 nt, Homo sapiens
  source 1..20: mol_type = genomic RNA
ggacctctcccagggtccct

SEQ ID NO: 13923 - RNA, 20 nt, Homo sapiens
  source 1..20: mol_type = genomic RNA
gacctctcccagggtccctg

SEQ ID NO: 13924 - RNA, 20 nt, Homo sapiens
  source 1..20: mol_type = genomic RNA
acctctcccagggtccctgg

SEQ ID NO: 13925 - RNA, 20 nt, Homo sapiens
  source 1..20: mol_type = genomic RNA
cctctcccagggtccctggg

SEQ ID NO: 13926 - RNA, 20 nt, Homo sapiens
  source 1..20: mol_type = genomic RNA
ctctcccagggtccctgggg

SEQ ID NO: 13927 - RNA, 20 nt, Homo sapiens
  source 1..20: mol_type = genomic RNA
tctcccagggtccctggggt

SEQ ID NO: 13928 - RNA, 20 nt, Homo sapiens
  source 1..20: mol_type = genomic RNA
ctcccagggtccctggggtg

SEQ ID NO: 13929 - RNA, 20 nt, Homo sapiens
  source 1..20: mol_type = genomic RNA
tcccagggtccctggggtgg

SEQ ID NO: 13930 - RNA, 20 nt, Homo sapiens
  source 1..20: mol_type = genomic RNA
cccagggtccctggggtggg

SEQ ID NO: 13931 - RNA, 20 nt, Homo sapiens
  source 1..20: mol_type = genomic RNA
ccagggtccctggggtgggg

SEQ ID NO: 13932 - RNA, 20 nt, Homo sapiens
  source 1..20: mol_type = genomic RNA
cagggtccctggggtgggga

SEQ ID NO: 13933 - RNA, 20 nt, Homo sapiens
  source 1..20: mol_type = genomic RNA
agggtccctggggtggggat

SEQ ID NO: 13934 - RNA, 20 nt, Homo sapiens
  source 1..20: mol_type = genomic RNA
gggtccctggggtggggata

SEQ ID NO: 13935 - RNA, 20 nt, Homo sapiens
  source 1..20: mol_type = genomic RNA
ggtccctggggtggggatag

SEQ ID NO: 13936 - RNA, 20 nt, Homo sapiens
  source 1..20: mol_type = genomic RNA
gtccctggggtggggatagg

SEQ ID NO: 13937 - RNA, 20 nt, Homo sapiens
  source 1..20: mol_type = genomic RNA
tccctggggtggggataggg

SEQ ID NO: 13938 - RNA, 20 nt, Homo sapiens
  source 1..20: mol_type = genomic RNA
ccctggggtggggataggga

SEQ ID NO: 13939 - RNA, 20 nt, Homo sapiens
  source 1..20: mol_type = genomic RNA
cctggggtggggatagggag

SEQ ID NO: 13940 - RNA, 20 nt, Homo sapiens
  source 1..20: mol_type = genomic RNA
ctggggtggggatagggagc

SEQ ID NO: 13941 - RNA, 20 nt, Homo sapiens
  source 1..20: mol_type = genomic RNA
tggggtggggatagggagca

SEQ ID NO: 13942 - RNA, 20 nt, Homo sapiens
  source 1..20: mol_type = genomic RNA
ggggtggggatagggagcag

SEQ ID NO: 13943 - RNA, 20 nt, Homo sapiens
  source 1..20: mol_type = genomic RNA
gggtggggatagggagcaga

SEQ ID NO: 13944 - RNA, 20 nt, Homo sapiens
  source 1..20: mol_type = genomic RNA
ggtggggatagggagcagat

SEQ ID NO: 13945 - RNA, 20 nt, Homo sapiens
  source 1..20: mol_type = genomic RNA
gtggggatagggagcagatg

SEQ ID NO: 13946 - RNA, 20 nt, Homo sapiens
  source 1..20: mol_type = genomic RNA
tggggatagggagcagatgc

SEQ ID NO: 13947 - RNA, 20 nt, Homo sapiens
  source 1..20: mol_type = genomic RNA
ggggatagggagcagatgca

SEQ ID NO: 13948 - RNA, 20 nt, Homo sapiens
  source 1..20: mol_type = genomic RNA
gggatagggagcagatgcaa

SEQ ID NO: 13949 - RNA, 20 nt, Homo sapiens
  source 1..20: mol_type = genomic RNA
ggatagggagcagatgcaat

SEQ ID NO: 13950 - RNA, 20 nt, Homo sapiens
  source 1..20: mol_type = genomic RNA
gatagggagcagatgcaatg

SEQ ID NO: 13951 - RNA, 20 nt, Homo sapiens
  source 1..20: mol_type = genomic RNA
atagggagcagatgcaatga

SEQ ID NO: 13952 - RNA, 20 nt, Homo sapiens
  source 1..20: mol_type = genomic RNA
tagggagcagatgcaatgac

SEQ ID NO: 13953 - RNA, 20 nt, Homo sapiens
  source 1..20: mol_type = genomic RNA
agggagcagatgcaatgact

SEQ ID NO: 13954 - RNA, 20 nt, Homo sapiens
  source 1..20: mol_type = genomic RNA
gggagcagatgcaatgactc

SEQ ID NO: 13955 - RNA, 20 nt, Homo sapiens
  source 1..20: mol_type = genomic RNA
ggagcagatgcaatgactca

SEQ ID NO: 13956 - RNA, 20 nt, Homo sapiens
  source 1..20: mol_type = genomic RNA
gagcagatgcaatgactcag

SEQ ID NO: 13957 - RNA, 20 nt, Homo sapiens
  source 1..20: mol_type = genomic RNA
agcagatgcaatgactcagg

SEQ ID NO: 13958 - RNA, 20 nt, Homo sapiens
  source 1..20: mol_type = genomic RNA
gcagatgcaatgactcagga

SEQ ID NO: 13959 - RNA, 20 nt, Homo sapiens
  source 1..20: mol_type = genomic RNA
cagatgcaatgactcaggac

SEQ ID NO: 13960 - RNA, 20 nt, Homo sapiens
  source 1..20: mol_type = genomic RNA
agatgcaatgactcaggaca

SEQ ID NO: 13961 - RNA, 20 nt, Homo sapiens
  source 1..20: mol_type = genomic RNA
gatgcaatgactcaggacat

SEQ ID NO: 13962 - RNA, 20 nt, Homo sapiens
  source 1..20: mol_type = genomic RNA
atgcaatgactcaggacatc

SEQ ID NO: 13963 - RNA, 20 nt, Homo sapiens
  source 1..20: mol_type = genomic RNA
tgcaatgactcaggacatcc

SEQ ID NO: 13964 - RNA, 20 nt, Homo sapiens
  source 1..20: mol_type = genomic RNA
gcaatgactcaggacatccc

SEQ ID NO: 13965 - RNA, 20 nt, Homo sapiens
  source 1..20: mol_type = genomic RNA
caatgactcaggacatcccc

SEQ ID NO: 13966 - RNA, 20 nt, Homo sapiens
  source 1..20: mol_type = genomic RNA
aatgactcaggacatccccc

SEQ ID NO: 13967 - RNA, 20 nt, Homo sapiens
  source 1..20: mol_type = genomic RNA
atgactcaggacatcccccc

SEQ ID NO: 13968 - RNA, 20 nt, Homo sapiens
  source 1..20: mol_type = genomic RNA
tgactcaggacatccccccg

SEQ ID NO: 13969 - RNA, 20 nt, Homo sapiens
  source 1..20: mol_type = genomic RNA
gactcaggacatccccccgc

SEQ ID NO: 13970 - RNA, 20 nt, Homo sapiens
  source 1..20: mol_type = genomic RNA
actcaggacatccccccgcc

SEQ ID NO: 13971 - RNA, 20 nt, Homo sapiens
  source 1..20: mol_type = genomic RNA
ctcaggacatccccccgcca

SEQ ID NO: 13972 - RNA, 20 nt, Homo sapiens
  source 1..20: mol_type = genomic RNA
tcaggacatccccccgccaa

SEQ ID NO: 13973 - RNA, 20 nt, Homo sapiens
  source 1..20: mol_type = genomic RNA
caggacatccccccgccaaa

SEQ ID NO: 13974 - RNA, 20 nt, Homo sapiens
  source 1..20: mol_type = genomic RNA
aggacatccccccgccaaaa

SEQ ID NO: 13975 - RNA, 20 nt, Homo sapiens
  source 1..20: mol_type = genomic RNA
ggacatccccccgccaaaag

SEQ ID NO: 13976 - RNA, 20 nt, Homo sapiens
  source 1..20: mol_type = genomic RNA
gacatccccccgccaaaagc

SEQ ID NO: 13977 - RNA, 20 nt, Homo sapiens
  source 1..20: mol_type = genomic RNA
acatccccccgccaaaagct

SEQ ID NO: 13978 - RNA, 20 nt, Homo sapiens
  source 1..20: mol_type = genomic RNA
catccccccgccaaaagctg

SEQ ID NO: 13979 - RNA, 20 nt, Homo sapiens
  source 1..20: mol_type = genomic RNA
atccccccgccaaaagctgc

SEQ ID NO: 13980 - RNA, 20 nt, Homo sapiens
  source 1..20: mol_type = genomic RNA
tccccccgccaaaagctgct

SEQ ID NO: 13981 - RNA, 20 nt, Homo sapiens
  source 1..20: mol_type = genomic RNA
ccccccgccaaaagctgctc

SEQ ID NO: 13982 - RNA, 20 nt, Homo sapiens
  source 1..20: mol_type = genomic RNA
cccccgccaaaagctgctca

SEQ ID NO: 13983 - RNA, 20 nt, Homo sapiens
  source 1..20: mol_type = genomic RNA
ccccgccaaaagctgctcag

SEQ ID NO: 13984 - RNA, 20 nt, Homo sapiens
  source 1..20: mol_type = genomic RNA
cccgccaaaagctgctcagg

SEQ ID NO: 13985 - RNA, 20 nt, Homo sapiens
  source 1..20: mol_type = genomic RNA
ccgccaaaagctgctcaggg

SEQ ID NO: 13986 - RNA, 20 nt, Homo sapiens
  source 1..20: mol_type = genomic RNA
cgccaaaagctgctcaggga

SEQ ID NO: 13987 - RNA, 20 nt, Homo sapiens
  source 1..20: mol_type = genomic RNA
gccaaaagctgctcagggaa

SEQ ID NO: 13988 - RNA, 20 nt, Homo sapiens
  source 1..20: mol_type = genomic RNA
ccaaaagctgctcagggaaa

SEQ ID NO: 13989 - RNA, 20 nt, Homo sapiens
  source 1..20: mol_type = genomic RNA
caaaagctgctcagggaaaa

SEQ ID NO: 13990 - RNA, 20 nt, Homo sapiens
  source 1..20: mol_type = genomic RNA
aaaagctgctcagggaaaag

SEQ ID NO: 13991 - RNA, 20 nt, Homo sapiens
  source 1..20: mol_type = genomic RNA
aaagctgctcagggaaaagc

SEQ ID NO: 13992 - RNA, 20 nt, Homo sapiens
  source 1..20: mol_type = genomic RNA
aagctgctcagggaaaagca

SEQ ID NO: 13993 - RNA, 20 nt, Homo sapiens
  source 1..20: mol_type = genomic RNA
agctgctcagggaaaagcag

SEQ ID NO: 13994 - RNA, 20 nt, Homo sapiens
  source 1..20: mol_type = genomic RNA
gctgctcagggaaaagcagc

SEQ ID NO: 13995 - RNA, 20 nt, Homo sapiens
  source 1..20: mol_type = genomic RNA
ctgctcagggaaaagcagct

SEQ ID NO: 13996 - RNA, 20 nt, Homo sapiens
  source 1..20: mol_type = genomic RNA
tgctcagggaaaagcagctc

SEQ ID NO: 13997 - RNA, 20 nt, Homo sapiens
  source 1..20: mol_type = genomic RNA
gctcagggaaaagcagctct

SEQ ID NO: 13998 - RNA, 20 nt, Homo sapiens
  source 1..20: mol_type = genomic RNA
ctcagggaaaagcagctctc

SEQ ID NO: 13999 - RNA, 20 nt, Homo sapiens
  source 1..20: mol_type = genomic RNA
tcagggaaaagcagctctcc

SEQ ID NO: 14000 - RNA, 20 nt, Homo sapiens
  source 1..20: mol_type = genomic RNA
cagggaaaagcagctctccc

SEQ ID NO: 14001 - RNA, 20 nt, Homo sapiens
  source 1..20: mol_type = genomic RNA
agggaaaagcagctctcccc

SEQ ID NO: 14002 - RNA, 20 nt, Homo sapiens
  source 1..20: mol_type = genomic RNA
gggaaaagcagctctcccct

SEQ ID NO: 14003 - RNA, 20 nt, Homo sapiens
  source 1..20: mol_type = genomic RNA
ggaaaagcagctctcccctc

SEQ ID NO: 14004 - RNA, 20 nt, Homo sapiens
  source 1..20: mol_type = genomic RNA
gaaaagcagctctcccctca

SEQ ID NO: 14005 - RNA, 20 nt, Homo sapiens
  source 1..20: mol_type = genomic RNA
aaaagcagctctcccctcag

SEQ ID NO: 14006 - RNA, 20 nt, Homo sapiens
  source 1..20: mol_type = genomic RNA
aaagcagctctcccctcaga

SEQ ID NO: 14007 - RNA, 20 nt, Homo sapiens
  source 1..20: mol_type = genomic RNA
aagcagctctcccctcagag

SEQ ID NO: 14008 - RNA, 20 nt, Homo sapiens
  source 1..20: mol_type = genomic RNA
agcagctctcccctcagagt

SEQ ID NO: 14009 - RNA, 20 nt, Homo sapiens
  source 1..20: mol_type = genomic RNA
gcagctctcccctcagagtg

SEQ ID NO: 14010 - RNA, 20 nt, Homo sapiens
  source 1..20: mol_type = genomic RNA
cagctctcccctcagagtgc

SEQ ID NO: 14011 - RNA, 20 nt, Homo sapiens
  source 1..20: mol_type = genomic RNA
agctctcccctcagagtgca

SEQ ID NO: 14012 - RNA, 20 nt, Homo sapiens
  source 1..20: mol_type = genomic RNA
gctctcccctcagagtgcaa

SEQ ID NO: 14013 - RNA, 20 nt, Homo sapiens
  source 1..20: mol_type = genomic RNA
ctctcccctcagagtgcaag

SEQ ID NO: 14014 - RNA, 20 nt, Homo sapiens
  source 1..20: mol_type = genomic RNA
tctcccctcagagtgcaagc

SEQ ID NO: 14015 - RNA, 20 nt, Homo sapiens
  source 1..20: mol_type = genomic RNA
ctcccctcagagtgcaagcc

SEQ ID NO: 14016 - RNA, 20 nt, Homo sapiens
  source 1..20: mol_type = genomic RNA
tcccctcagagtgcaagccc

SEQ ID NO: 14017 - RNA, 20 nt, Homo sapiens
  source 1..20: mol_type = genomic RNA
cccctcagagtgcaagcccc

SEQ ID NO: 14018 - RNA, 20 nt, Homo sapiens
  source 1..20: mol_type = genomic RNA
ccctcagagtgcaagcccct

SEQ ID NO: 14019 - RNA, 20 nt, Homo sapiens
  source 1..20: mol_type = genomic RNA
cctcagagtgcaagcccctg

SEQ ID NO: 14020 - RNA, 20 nt, Homo sapiens
  source 1..20: mol_type = genomic RNA
ctcagagtgcaagcccctgc

SEQ ID NO: 14021 - RNA, 20 nt, Homo sapiens
  source 1..20: mol_type = genomic RNA
tcagagtgcaagcccctgct

SEQ ID NO: 14022 - RNA, 20 nt, Homo sapiens
  source 1..20: mol_type = genomic RNA
cagagtgcaagcccctgctc

SEQ ID NO: 14023 - RNA, 20 nt, Homo sapiens
  source 1..20: mol_type = genomic RNA
agagtgcaagcccctgctcc

SEQ ID NO: 14024 - RNA, 20 nt, Homo sapiens
  source 1..20: mol_type = genomic RNA
gagtgcaagcccctgctcca

SEQ ID NO: 14025 - RNA, 20 nt, Homo sapiens
  source 1..20: mol_type = genomic RNA
agtgcaagcccctgctccag

SEQ ID NO: 14026 - RNA, 20 nt, Homo sapiens
  source 1..20: mol_type = genomic RNA
gtgcaagcccctgctccaga

SEQ ID NO: 14027 - RNA, 20 nt, Homo sapiens
  source 1..20: mol_type = genomic RNA
tgcaagcccctgctccagaa

SEQ ID NO: 14028 - RNA, 20 nt, Homo sapiens
  source 1..20: mol_type = genomic RNA
gcaagcccctgctccagaag

SEQ ID NO: 14029 - RNA, 20 nt, Homo sapiens
  source 1..20: mol_type = genomic RNA
caagcccctgctccagaaga

SEQ ID NO: 14030 - RNA, 20 nt, Homo sapiens
  source 1..20: mol_type = genomic RNA
aagcccctgctccagaagat

SEQ ID NO: 14031 - RNA, 20 nt, Homo sapiens
  source 1..20: mol_type = genomic RNA
agcccctgctccagaagata

SEQ ID NO: 14032 - RNA, 20 nt, Homo sapiens
  source 1..20: mol_type = genomic RNA
gcccctgctccagaagatag

SEQ ID NO: 14033 - RNA, 20 nt, Homo sapiens
  source 1..20: mol_type = genomic RNA
cccctgctccagaagatagc

SEQ ID NO: 14034 - RNA, 20 nt, Homo sapiens
  source 1..20: mol_type = genomic RNA
ccctgctccagaagatagct

SEQ ID NO: 14035 - RNA, 20 nt, Homo sapiens
  source 1..20: mol_type = genomic RNA
cctgctccagaagatagctt

SEQ ID NO: 14036 - RNA, 20 nt, Homo sapiens
  source 1..20: mol_type = genomic RNA
ctgctccagaagatagcttc

SEQ ID NO: 14037 - RNA, 20 nt, Homo sapiens
  source 1..20: mol_type = genomic RNA
tgctccagaagatagcttca

SEQ ID NO: 14038 - RNA, 20 nt, Homo sapiens
  source 1..20: mol_type = genomic RNA
gctccagaagatagcttcac

SEQ ID NO: 14039 - RNA, 20 nt, Homo sapiens
  source 1..20: mol_type = genomic RNA
ctccagaagatagcttcacc

SEQ ID NO: 14040 - RNA, 20 nt, Homo sapiens
  source 1..20: mol_type = genomic RNA
tccagaagatagcttcaccc

SEQ ID NO: 14041 - RNA, 20 nt, Homo sapiens
  source 1..20: mol_type = genomic RNA
ccagaagatagcttcacccc

SEQ ID NO: 14042 - RNA, 20 nt, Homo sapiens
  source 1..20: mol_type = genomic RNA
cagaagatagcttcacccca

SEQ ID NO: 14043 - RNA, 20 nt, Homo sapiens
  source 1..20: mol_type = genomic RNA
agaagatagcttcaccccaa

SEQ ID NO: 14044 - RNA, 20 nt, Homo sapiens
  source 1..20: mol_type = genomic RNA
gaagatagcttcaccccaat

SEQ ID NO: 14045 - RNA, 20 nt, Homo sapiens
  source 1..20: mol_type = genomic RNA
aagatagcttcaccccaatc

SEQ ID NO: 14046 - RNA, 20 nt, Homo sapiens
  source 1..20: mol_type = genomic RNA
agatagcttcaccccaatcc

SEQ ID NO: 14047 - RNA, 20 nt, Homo sapiens
  source 1..20: mol_type = genomic RNA
gatagcttcaccccaatccc

SEQ ID NO: 14048 - RNA, 20 nt, Homo sapiens
  source 1..20: mol_type = genomic RNA
atagcttcaccccaatccca

SEQ ID NO: 14049 - RNA, 20 nt, Homo sapiens
  source 1..20: mol_type = genomic RNA
tagcttcaccccaatcccag

SEQ ID NO: 14050 - RNA, 20 nt, Homo sapiens
  source 1..20: mol_type = genomic RNA
agcttcaccccaatcccagc

SEQ ID NO: 14051 - RNA, 20 nt, Homo sapiens
  source 1..20: mol_type = genomic RNA
gcttcaccccaatcccagct

SEQ ID NO: 14052 - RNA, 20 nt, Homo sapiens
  source 1..20: mol_type = genomic RNA
cttcaccccaatcccagcta

SEQ ID NO: 14053 - RNA, 20 nt, Homo sapiens
  source 1..20: mol_type = genomic RNA
ttcaccccaatcccagctac

SEQ ID NO: 14054 - RNA, 20 nt, Homo sapiens
  source 1..20: mol_type = genomic RNA
tcaccccaatcccagctacc

SEQ ID NO: 14055 - RNA, 20 nt, Homo sapiens
  source 1..20: mol_type = genomic RNA
caccccaatcccagctacct

SEQ ID NO: 14056 - RNA, 20 nt, Homo sapiens
  source 1..20: mol_type = genomic RNA
accccaatcccagctacctc

SEQ ID NO: 14057 - RNA, 20 nt, Homo sapiens
  source 1..20: mol_type = genomic RNA
ccccaatcccagctacctca

SEQ ID NO: 14058 - RNA, 20 nt, Homo sapiens
  source 1..20: mol_type = genomic RNA
cccaatcccagctacctcaa

SEQ ID NO: 14059 - RNA, 20 nt, Homo sapiens
  source 1..20: mol_type = genomic RNA
ccaatcccagctacctcaac

SEQ ID NO: 14060 - RNA, 20 nt, Homo sapiens
  source 1..20: mol_type = genomic RNA
caatcccagctacctcaacc

SEQ ID NO: 14061 - RNA, 20 nt, Homo sapiens
  source 1..20: mol_type = genomic RNA
aatcccagctacctcaacca

SEQ ID NO: 14062 - RNA, 20 nt, Homo sapiens
  source 1..20: mol_type = genomic RNA
atcccagctacctcaaccaa

SEQ ID NO: 14063 - RNA, 20 nt, Homo sapiens
  source 1..20: mol_type = genomic RNA
tcccagctacctcaaccaat

SEQ ID NO: 14064 - RNA, 20 nt, Homo sapiens
  source 1..20: mol_type = genomic RNA
cccagctacctcaaccaatg

SEQ ID NO: 14065 - RNA, 20 nt, Homo sapiens
  source 1..20: mol_type = genomic RNA
ccagctacctcaaccaatgc

SEQ ID NO: 14066 - RNA, 20 nt, Homo sapiens
  source 1..20: mol_type = genomic RNA
cagctacctcaaccaatgcc

SEQ ID NO: 14067 - RNA, 20 nt, Homo sapiens
  source 1..20: mol_type = genomic RNA
agctacctcaaccaatgcca

SEQ ID NO: 14068 - RNA, 20 nt, Homo sapiens
  source 1..20: mol_type = genomic RNA
gctacctcaaccaatgccaa

SEQ ID NO: 14069 - RNA, 20 nt, Homo sapiens
  source 1..20: mol_type = genomic RNA
ctacctcaaccaatgccaaa

SEQ ID NO: 14070 - RNA, 20 nt, Homo sapiens
  source 1..20: mol_type = genomic RNA
tacctcaaccaatgccaaaa

SEQ ID NO: 14071 - RNA, 20 nt, Homo sapiens
  source 1..20: mol_type = genomic RNA
acctcaaccaatgccaaaaa

SEQ ID NO: 14072 - RNA, 20 nt, Homo sapiens
  source 1..20: mol_type = genomic RNA
cctcaaccaatgccaaaaaa

SEQ ID NO: 14073 - RNA, 20 nt, Homo sapiens
  source 1..20: mol_type = genomic RNA
ctcaaccaatgccaaaaaaa

SEQ ID NO: 14074 - RNA, 20 nt, Homo sapiens
  source 1..20: mol_type = genomic RNA
tcaaccaatgccaaaaaaag

SEQ ID NO: 14075 - RNA, 20 nt, Homo sapiens
  source 1..20: mol_type = genomic RNA
caaccaatgccaaaaaaaga

SEQ ID NO: 14076 - RNA, 20 nt, Homo sapiens
  source 1..20: mol_type = genomic RNA
aaccaatgccaaaaaaagac

SEQ ID NO: 14077 - RNA, 20 nt, Homo sapiens
  source 1..20: mol_type = genomic RNA
accaatgccaaaaaaagaca

SEQ ID NO: 14078 - RNA, 20 nt, Homo sapiens
  source 1..20: mol_type = genomic RNA
ccaatgccaaaaaaagacag

SEQ ID NO: 14079 - RNA, 20 nt, Homo sapiens
  source 1..20: mol_type = genomic RNA
caatgccaaaaaaagacagg

SEQ ID NO: 14080 - RNA, 20 nt, Homo sapiens
  source 1..20: mol_type = genomic RNA
aatgccaaaaaaagacaggg

SEQ ID NO: 14081 - RNA, 20 nt, Homo sapiens
  source 1..20: mol_type = genomic RNA
atgccaaaaaaagacagggc

SEQ ID NO: 14082 - RNA, 20 nt, Homo sapiens
  source 1..20: mol_type = genomic RNA
tgccaaaaaaagacagggct

SEQ ID NO: 14083 - RNA, 20 nt, Homo sapiens
  source 1..20: mol_type = genomic RNA
gccaaaaaaagacagggctg

SEQ ID NO: 14084 - RNA, 20 nt, Homo sapiens
  source 1..20: mol_type = genomic RNA
ccaaaaaaagacagggctga

SEQ ID NO: 14085 - RNA, 20 nt, Homo sapiens
  source 1..20: mol_type = genomic RNA
caaaaaaagacagggctgat

SEQ ID NO: 14086 - RNA, 20 nt, Homo sapiens
  source 1..20: mol_type = genomic RNA
aaaaaaagacagggctgata

SEQ ID NO: 14087 - RNA, 20 nt, Homo sapiens
  source 1..20: mol_type = genomic RNA
aaaaaagacagggctgataa

SEQ ID NO: 14088 - RNA, 20 nt, Homo sapiens
  source 1..20: mol_type = genomic RNA
aaaaagacagggctgataag

SEQ ID NO: 14089 - RNA, 20 nt, Homo sapiens
  source 1..20: mol_type = genomic RNA
aaaagacagggctgataagc

SEQ ID NO: 14090 - RNA, 20 nt, Homo sapiens
  source 1..20: mol_type = genomic RNA
aaagacagggctgataagct

SEQ ID NO: 14091 - RNA, 20 nt, Homo sapiens
  source 1..20: mol_type = genomic RNA
aagacagggctgataagcta

SEQ ID NO: 14092 - RNA, 20 nt, Homo sapiens
  source 1..20: mol_type = genomic RNA
agacagggctgataagctaa

SEQ ID NO: 14093 - RNA, 20 nt, Homo sapiens
  source 1..20: mol_type = genomic RNA
gacagggctgataagctaac

SEQ ID NO: 14094 - RNA, 20 nt, Homo sapiens
  source 1..20: mol_type = genomic RNA
acagggctgataagctaaca

SEQ ID NO: 14095 - RNA, 20 nt, Homo sapiens
  source 1..20: mol_type = genomic RNA
cagggctgataagctaacac

SEQ ID NO: 14096 - RNA, 20 nt, Homo sapiens
  source 1..20: mol_type = genomic RNA
agggctgataagctaacacc

SEQ ID NO: 14097 - RNA, 20 nt, Homo sapiens
  source 1..20: mol_type = genomic RNA
gggctgataagctaacacca

SEQ ID NO: 14098 - RNA, 20 nt, Homo sapiens
  source 1..20: mol_type = genomic RNA
ggctgataagctaacaccag

SEQ ID NO: 14099 - RNA, 20 nt, Homo sapiens
  source 1..20: mol_type = genomic RNA
gctgataagctaacaccaga

SEQ ID NO: 14100 - RNA, 20 nt, Homo sapiens
  source 1..20: mol_type = genomic RNA
ctgataagctaacaccagac

SEQ ID NO: 14101 - RNA, 20 nt, Homo sapiens
  source 1..20: mol_type = genomic RNA
tgataagctaacaccagaca

SEQ ID NO: 14102 - RNA, 20 nt, Homo sapiens
  source 1..20: mol_type = genomic RNA
gataagctaacaccagacag

SEQ ID NO: 14103 - RNA, 20 nt, Homo sapiens
  source 1..20: mol_type = genomic RNA
ataagctaacaccagacaga

SEQ ID NO: 14104 - RNA, 20 nt, Homo sapiens
  source 1..20: mol_type = genomic RNA
taagctaacaccagacagac

SEQ ID NO: 14105 - RNA, 20 nt, Homo sapiens
  source 1..20: mol_type = genomic RNA
aagctaacaccagacagaca

SEQ ID NO: 14106 - RNA, 20 nt, Homo sapiens
  source 1..20: mol_type = genomic RNA
agctaacaccagacagacaa

SEQ ID NO: 14107 - RNA, 20 nt, Homo sapiens
  source 1..20: mol_type = genomic RNA
gctaacaccagacagacaac

SEQ ID NO: 14108 - RNA, 20 nt, Homo sapiens
  source 1..20: mol_type = genomic RNA
ctaacaccagacagacaaca

SEQ ID NO: 14109 - RNA, 20 nt, Homo sapiens
  source 1..20: mol_type = genomic RNA
taacaccagacagacaacac

SEQ ID NO: 14110 - RNA, 20 nt, Homo sapiens
  source 1..20: mol_type = genomic RNA
aacaccagacagacaacact

SEQ ID NO: 14111 - RNA, 20 nt, Homo sapiens
  source 1..20: mol_type = genomic RNA
acaccagacagacaacactg

SEQ ID NO: 14112 - RNA, 20 nt, Homo sapiens
  source 1..20: mol_type = genomic RNA
caccagacagacaacactgg

SEQ ID NO: 14113 - RNA, 20 nt, Homo sapiens
  source 1..20: mol_type = genomic RNA
accagacagacaacactggg

SEQ ID NO: 14114 - RNA, 20 nt, Homo sapiens
  source 1..20: mol_type = genomic RNA
ccagacagacaacactggga

SEQ ID NO: 14115 - RNA, 20 nt, Homo sapiens
  source 1..20: mol_type = genomic RNA
cagacagacaacactgggaa

SEQ ID NO: 14116 - RNA, 20 nt, Homo sapiens
  source 1..20: mol_type = genomic RNA
agacagacaacactgggaaa

SEQ ID NO: 14117 - RNA, 20 nt, Homo sapiens
  source 1..20: mol_type = genomic RNA
gacagacaacactgggaaac

SEQ ID NO: 14118 - RNA, 20 nt, Homo sapiens
  source 1..20: mol_type = genomic RNA
acagacaacactgggaaaca

SEQ ID NO: 14119 - RNA, 20 nt, Homo sapiens
  source 1..20: mol_type = genomic RNA
cagacaacactgggaaacag

SEQ ID NO: 14120 - RNA, 20 nt, Homo sapiens
  source 1..20: mol_type = genomic RNA
agacaacactgggaaacaga

SEQ ID NO: 14121 - RNA, 20 nt, Homo sapiens
  source 1..20: mol_type = genomic RNA
gacaacactgggaaacagag

SEQ ID NO: 14122 - RNA, 20 nt, Homo sapiens
  source 1..20: mol_type = genomic RNA
acaacactgggaaacagagg

SEQ ID NO: 14123 - RNA, 20 nt, Homo sapiens
  source 1..20: mol_type = genomic RNA
caacactgggaaacagaggc

SEQ ID NO: 14124 - RNA, 20 nt, Homo sapiens
  source 1..20: mol_type = genomic RNA
aacactgggaaacagaggct

SEQ ID NO: 14125 - RNA, 20 nt, Homo sapiens
  source 1..20: mol_type = genomic RNA
acactgggaaacagaggcta

SEQ ID NO: 14126 - RNA, 20 nt, Homo sapiens
  source 1..20: mol_type = genomic RNA
cactgggaaacagaggctat

SEQ ID NO: 14127 - RNA, 20 nt, Homo sapiens
  source 1..20: mol_type = genomic RNA
actgggaaacagaggctatt

SEQ ID NO: 14128 - RNA, 20 nt, Homo sapiens
  source 1..20: mol_type = genomic RNA
ctgggaaacagaggctattg

SEQ ID NO: 14129 - RNA, 20 nt, Homo sapiens
  source 1..20: mol_type = genomic RNA
tgggaaacagaggctattgt

SEQ ID NO: 14130 - RNA, 20 nt, Homo sapiens
  source 1..20: mol_type = genomic RNA
gggaaacagaggctattgtc

SEQ ID NO: 14131 - RNA, 20 nt, Homo sapiens
  source 1..20: mol_type = genomic RNA
ggaaacagaggctattgtcc

SEQ ID NO: 14132 - RNA, 20 nt, Homo sapiens
  source 1..20: mol_type = genomic RNA
gaaacagaggctattgtccc

SEQ ID NO: 14133 - RNA, 20 nt, Homo sapiens
  source 1..20: mol_type = genomic RNA
aaacagaggctattgtcccc

SEQ ID NO: 14134 - RNA, 20 nt, Homo sapiens
  source 1..20: mol_type = genomic RNA
aacagaggctattgtcccct

SEQ ID NO: 14135 - RNA, 20 nt, Homo sapiens
  source 1..20: mol_type = genomic RNA
acagaggctattgtccccta

SEQ ID NO: 14136 - RNA, 20 nt, Homo sapiens
  source 1..20: mol_type = genomic RNA
cagaggctattgtcccctaa

SEQ ID NO: 14137 - RNA, 20 nt, Homo sapiens
  source 1..20: mol_type = genomic RNA
agaggctattgtcccctaaa

SEQ ID NO: 14138 - RNA, 20 nt, Homo sapiens
  source 1..20: mol_type = genomic RNA
gaggctattgtcccctaaac

SEQ ID NO: 14139 - RNA, 20 nt, Homo sapiens
  source 1..20: mol_type = genomic RNA
aggctattgtcccctaaacc

SEQ ID NO: 14140 - RNA, 20 nt, Homo sapiens
  source 1..20: mol_type = genomic RNA
ggctattgtcccctaaacca

SEQ ID NO: 14141 - RNA, 20 nt, Homo sapiens
  source 1..20: mol_type = genomic RNA
gctattgtcccctaaaccaa

SEQ ID NO: 14142 - RNA, 20 nt, Homo sapiens
  source 1..20: mol_type = genomic RNA
ctattgtcccctaaaccaaa

SEQ ID NO: 14143 - RNA, 20 nt, Homo sapiens
  source 1..20: mol_type = genomic RNA
tattgtcccctaaaccaaaa

SEQ ID NO: 14144 - RNA, 20 nt, Homo sapiens
  source 1..20: mol_type = genomic RNA
attgtcccctaaaccaaaaa

SEQ ID NO: 14145 - RNA, 20 nt, Homo sapiens
  source 1..20: mol_type = genomic RNA
ttgtcccctaaaccaaaaac

SEQ ID NO: 14146 - RNA, 20 nt, Homo sapiens
  source 1..20: mol_type = genomic RNA
tgtcccctaaaccaaaaact

SEQ ID NO: 14147 - RNA, 20 nt, Homo sapiens
  source 1..20: mol_type = genomic RNA
gtcccctaaaccaaaaactg

SEQ ID NO: 14148 - RNA, 20 nt, Homo sapiens
  source 1..20: mol_type = genomic RNA
tcccctaaaccaaaaactga

SEQ ID NO: 14149 - RNA, 20 nt, Homo sapiens
  source 1..20: mol_type = genomic RNA
cccctaaaccaaaaactgaa

SEQ ID NO: 14150 - RNA, 20 nt, Homo sapiens
  source 1..20: mol_type = genomic RNA
ccctaaaccaaaaactgaaa

SEQ ID NO: 14151 - RNA, 20 nt, Homo sapiens
  source 1..20: mol_type = genomic RNA
cctaaaccaaaaactgaaag

SEQ ID NO: 14152 - RNA, 20 nt, Homo sapiens
  source 1..20: mol_type = genomic RNA
ctaaaccaaaaactgaaagt

SEQ ID NO: 14153 - RNA, 20 nt, Homo sapiens
  source 1..20: mol_type = genomic RNA
taaaccaaaaactgaaagtg

SEQ ID NO: 14154 - RNA, 20 nt, Homo sapiens
  source 1..20: mol_type = genomic RNA
aaaccaaaaactgaaagtga

SEQ ID NO: 14155 - RNA, 20 nt, Homo sapiens
  source 1..20: mol_type = genomic RNA
aaccaaaaactgaaagtgaa

SEQ ID NO: 14156 - RNA, 20 nt, Homo sapiens
  source 1..20: mol_type = genomic RNA
accaaaaactgaaagtgaaa

SEQ ID NO: 14157 - RNA, 20 nt, Homo sapiens
  source 1..20: mol_type = genomic RNA
ccaaaaactgaaagtgaaag

SEQ ID NO: 14158 - RNA, 20 nt, Homo sapiens
  source 1..20: mol_type = genomic RNA
caaaaactgaaagtgaaagt

SEQ ID NO: 14159 - RNA, 20 nt, Homo sapiens
  source 1..20: mol_type = genomic RNA
aaaaactgaaagtgaaagtc

SEQ ID NO: 14160 - RNA, 20 nt, Homo sapiens
  source 1..20: mol_type = genomic RNA
aaaactgaaagtgaaagtcc

SEQ ID NO: 14161 - RNA, 20 nt, Homo sapiens
  source 1..20: mol_type = genomic RNA
aaactgaaagtgaaagtcca

SEQ ID NO: 14162 - RNA, 20 nt, Homo sapiens
  source 1..20: mol_type = genomic RNA
aactgaaagtgaaagtccag

SEQ ID NO: 14163 - RNA, 20 nt, Homo sapiens
  source 1..20: mol_type = genomic RNA
actgaaagtgaaagtccaga

SEQ ID NO: 14164 - RNA, 20 nt, Homo sapiens
  source 1..20: mol_type = genomic RNA
ctgaaagtgaaagtccagaa

SEQ ID NO: 14165 - RNA, 20 nt, Homo sapiens
  source 1..20: mol_type = genomic RNA
tgaaagtgaaagtccagaaa

SEQ ID NO: 14166 - RNA, 20 nt, Homo sapiens
  source 1..20: mol_type = genomic RNA
gaaagtgaaagtccagaaac

SEQ ID NO: 14167 - RNA, 20 nt, Homo sapiens
  source 1..20: mol_type = genomic RNA
aaagtgaaagtccagaaact

SEQ ID NO: 14168 - RNA, 20 nt, Homo sapiens
  source 1..20: mol_type = genomic RNA
aagtgaaagtccagaaactg

SEQ ID NO: 14169 - RNA, 20 nt, Homo sapiens
  source 1..20: mol_type = genomic RNA
agtgaaagtccagaaactgt

SEQ ID NO: 14170 - RNA, 20 nt, Homo sapiens
  source 1..20: mol_type = genomic RNA
gtgaaagtccagaaactgtt

SEQ ID NO: 14171 - RNA, 20 nt, Homo sapiens
  source 1..20: mol_type = genomic RNA
tgaaagtccagaaactgttc

SEQ ID NO: 14172 - RNA, 20 nt, Homo sapiens
  source 1..20: mol_type = genomic RNA
gaaagtccagaaactgttcc

SEQ ID NO: 14173 - RNA, 20 nt, Homo sapiens
  source 1..20: mol_type = genomic RNA
aaagtccagaaactgttccc

SEQ ID NO: 14174 - RNA, 20 nt, Homo sapiens
  source 1..20: mol_type = genomic RNA
aagtccagaaactgttccca

SEQ ID NO: 14175 - RNA, 20 nt, Homo sapiens
  source 1..20: mol_type = genomic RNA
agtccagaaactgttcccac

SEQ ID NO: 14176 - RNA, 20 nt, Homo sapiens
  source 1..20: mol_type = genomic RNA
gtccagaaactgttcccacc

SEQ ID NO: 14177 - RNA, 20 nt, Homo sapiens
  source 1..20: mol_type = genomic RNA
tccagaaactgttcccacct

SEQ ID NO: 14178 - RNA, 20 nt, Homo sapiens
  source 1..20: mol_type = genomic RNA
ccagaaactgttcccacctg

SEQ ID NO: 14179 - RNA, 20 nt, Homo sapiens
  source 1..20: mol_type = genomic RNA
cagaaactgttcccacctgc

SEQ ID NO: 14180 - RNA, 20 nt, Homo sapiens
  source 1..20: mol_type = genomic RNA
agaaactgttcccacctgct

SEQ ID NO: 14181 - RNA, 20 nt, Homo sapiens
  source 1..20: mol_type = genomic RNA
gaaactgttcccacctgctg

SEQ ID NO: 14182 - RNA, 20 nt, Homo sapiens
  source 1..20: mol_type = genomic RNA
aaactgttcccacctgctgg

SEQ ID NO: 14183 - RNA, 20 nt, Homo sapiens
  source 1..20: mol_type = genomic RNA
aactgttcccacctgctgga

SEQ ID NO: 14184 - RNA, 20 nt, Homo sapiens
  source 1..20: mol_type = genomic RNA
actgttcccacctgctggag

SEQ ID NO: 14185 - RNA, 20 nt, Homo sapiens
  source 1..20: mol_type = genomic RNA
ctgttcccacctgctggagt

SEQ ID NO: 14186 - RNA, 20 nt, Homo sapiens
  source 1..20: mol_type = genomic RNA
tgttcccacctgctggagtg

SEQ ID NO: 14187 - RNA, 20 nt, Homo sapiens
  source 1..20: mol_type = genomic RNA
gttcccacctgctggagtga

SEQ ID NO: 14188 - RNA, 20 nt, Homo sapiens
  source 1..20: mol_type = genomic RNA
ttcccacctgctggagtgaa

SEQ ID NO: 14189 - RNA, 20 nt, Homo sapiens
  source 1..20: mol_type = genomic RNA
tcccacctgctggagtgaag

SEQ ID NO: 14190 - RNA, 20 nt, Homo sapiens
  source 1..20: mol_type = genomic RNA
cccacctgctggagtgaagg

SEQ ID NO: 14191 - RNA, 20 nt, Homo sapiens
  source 1..20: mol_type = genomic RNA
ccacctgctggagtgaaggg

SEQ ID NO: 14192 - RNA, 20 nt, Homo sapiens
  source 1..20: mol_type = genomic RNA
cacctgctggagtgaagggg

SEQ ID NO: 14193 - RNA, 20 nt, Homo sapiens
  source 1..20: mol_type = genomic RNA
acctgctggagtgaaggggc

SEQ ID NO: 14194 - RNA, 20 nt, Homo sapiens
  source 1..20: mol_type = genomic RNA
cctgctggagtgaaggggcc

SEQ ID NO: 14195 - RNA, 20 nt, Homo sapiens
  source 1..20: mol_type = genomic RNA
ctgctggagtgaaggggcca

SEQ ID NO: 14196 - RNA, 20 nt, Homo sapiens
  source 1..20: mol_type = genomic RNA
tgctggagtgaaggggccaa

SEQ ID NO: 14197 - RNA, 20 nt, Homo sapiens
  source 1..20: mol_type = genomic RNA
gctggagtgaaggggccaag

SEQ ID NO: 14198 - RNA, 20 nt, Homo sapiens
  source 1..20: mol_type = genomic RNA
ctggagtgaaggggccaagg

SEQ ID NO: 14199 - RNA, 20 nt, Homo sapiens
  source 1..20: mol_type = genomic RNA
tggagtgaaggggccaagga

SEQ ID NO: 14200 - RNA, 20 nt, Homo sapiens
  source 1..20: mol_type = genomic RNA
ggagtgaaggggccaaggag

SEQ ID NO: 14201 - RNA, 20 nt, Homo sapiens
  source 1..20: mol_type = genomic RNA
gagtgaaggggccaaggagg

SEQ ID NO: 14202 - RNA, 20 nt, Homo sapiens
  source 1..20: mol_type = genomic RNA
agtgaaggggccaaggaggg

SEQ ID NO: 14203 - RNA, 20 nt, Homo sapiens
  source 1..20: mol_type = genomic RNA
gtgaaggggccaaggagggt

SEQ ID NO: 14204 - RNA, 20 nt, Homo sapiens
  source 1..20: mol_type = genomic RNA
tgaaggggccaaggagggtg

SEQ ID NO: 14205 - RNA, 20 nt, Homo sapiens
  source 1..20: mol_type = genomic RNA
gaaggggccaaggagggtga

SEQ ID NO: 14206 - RNA, 20 nt, Homo sapiens
  source 1..20: mol_type = genomic RNA
aaggggccaaggagggtgag

SEQ ID NO: 14207 - RNA, 20 nt, Homo sapiens
  source 1..20: mol_type = genomic RNA
aggggccaaggagggtgagt

SEQ ID NO: 14208 - RNA, 20 nt, Homo sapiens
  source 1..20: mol_type = genomic RNA
ggggccaaggagggtgagtg

SEQ ID NO: 14209 - RNA, 20 nt, Homo sapiens
  source 1..20: mol_type = genomic RNA
gggccaaggagggtgagtgc

SEQ ID NO: 14210 - RNA, 20 nt, Homo sapiens
  source 1..20: mol_type = genomic RNA
ggccaaggagggtgagtgca

SEQ ID NO: 14211 - RNA, 20 nt, Homo sapiens
  source 1..20: mol_type = genomic RNA
gccaaggagggtgagtgcaa

SEQ ID NO: 14212 - RNA, 20 nt, Homo sapiens
  source 1..20: mol_type = genomic RNA
ccaaggagggtgagtgcaag

SEQ ID NO: 14213 - RNA, 20 nt, Homo sapiens
  source 1..20: mol_type = genomic RNA
caaggagggtgagtgcaagg

SEQ ID NO: 14214 - RNA, 20 nt, Homo sapiens
  source 1..20: mol_type = genomic RNA
aaggagggtgagtgcaaggg

SEQ ID NO: 14215 - RNA, 20 nt, Homo sapiens
  source 1..20: mol_type = genomic RNA
aggagggtgagtgcaagggg

SEQ ID NO: 14216 - RNA, 20 nt, Homo sapiens
  source 1..20: mol_type = genomic RNA
ggagggtgagtgcaaggggc

SEQ ID NO: 14217 - RNA, 20 nt, Homo sapiens
  source 1..20: mol_type = genomic RNA
gagggtgagtgcaaggggcg

SEQ ID NO: 14218 - RNA, 20 nt, Homo sapiens
  source 1..20: mol_type = genomic RNA
agggtgagtgcaaggggcgt

SEQ ID NO: 14219 - RNA, 20 nt, Homo sapiens
  source 1..20: mol_type = genomic RNA
gggtgagtgcaaggggcgtg

SEQ ID NO: 14220 - RNA, 20 nt, Homo sapiens
  source 1..20: mol_type = genomic RNA
ggtgagtgcaaggggcgtgg

SEQ ID NO: 14221 - RNA, 20 nt, Homo sapiens
  source 1..20: mol_type = genomic RNA
gtgagtgcaaggggcgtggg

SEQ ID NO: 14222 - RNA, 20 nt, Homo sapiens
  source 1..20: mol_type = genomic RNA
tgagtgcaaggggcgtggga

SEQ ID NO: 14223 - RNA, 20 nt, Homo sapiens
  source 1..20: mol_type = genomic RNA
gagtgcaaggggcgtgggag

SEQ ID NO: 14224 - RNA, 20 nt, Homo sapiens
  source 1..20: mol_type = genomic RNA
agtgcaaggggcgtgggagt

SEQ ID NO: 14225 - RNA, 20 nt, Homo sapiens
  source 1..20: mol_type = genomic RNA
gtgcaaggggcgtgggagtg

SEQ ID NO: 14226 - RNA, 20 nt, Homo sapiens
  source 1..20: mol_type = genomic RNA
tgcaaggggcgtgggagtgg

SEQ ID NO: 14227 - RNA, 20 nt, Homo sapiens
  source 1..20: mol_type = genomic RNA
gcaaggggcgtgggagtggc

SEQ ID NO: 14228 - RNA, 20 nt, Homo sapiens
  source 1..20: mol_type = genomic RNA
caaggggcgtgggagtggcc

SEQ ID NO: 14229 - RNA, 20 nt, Homo sapiens
  source 1..20: mol_type = genomic RNA
aaggggcgtgggagtggcct

SEQ ID NO: 14230 - RNA, 20 nt, Homo sapiens
  source 1..20: mol_type = genomic RNA
aggggcgtgggagtggcctg

SEQ ID NO: 14231 - RNA, 20 nt, Homo sapiens
  source 1..20: mol_type = genomic RNA
ggggcgtgggagtggcctga

SEQ ID NO: 14232 - RNA, 20 nt, Homo sapiens
  source 1..20: mol_type = genomic RNA
gggcgtgggagtggcctgaa

SEQ ID NO: 14233 - RNA, 20 nt, Homo sapiens
  source 1..20: mol_type = genomic RNA
ggcgtgggagtggcctgaag

SEQ ID NO: 14234 - RNA, 20 nt, Homo sapiens
  source 1..20: mol_type = genomic RNA
gcgtgggagtggcctgaaga

SEQ ID NO: 14235 - RNA, 20 nt, Homo sapiens
  source 1..20: mol_type = genomic RNA
cgtgggagtggcctgaagag

SEQ ID NO: 14236 - RNA, 20 nt, Homo sapiens
  source 1..20: mol_type = genomic RNA
gtgggagtggcctgaagagt

SEQ ID NO: 14237 - RNA, 20 nt, Homo sapiens
  source 1..20: mol_type = genomic RNA
tgggagtggcctgaagagtc

SEQ ID NO: 14238 - RNA, 20 nt, Homo sapiens
  source 1..20: mol_type = genomic RNA
gggagtggcctgaagagtcc

SEQ ID NO: 14239 - RNA, 20 nt, Homo sapiens
  source 1..20: mol_type = genomic RNA
ggagtggcctgaagagtcct

SEQ ID NO: 14240 - RNA, 20 nt, Homo sapiens
  source 1..20: mol_type = genomic RNA
gagtggcctgaagagtcctc

SEQ ID NO: 14241 - RNA, 20 nt, Homo sapiens
  source 1..20: mol_type = genomic RNA
agtggcctgaagagtcctct

SEQ ID NO: 14242 - RNA, 20 nt, Homo sapiens
  source 1..20: mol_type = genomic RNA
gtggcctgaagagtcctctg

SEQ ID NO: 14243 - RNA, 20 nt, Homo sapiens
  source 1..20: mol_type = genomic RNA
tggcctgaagagtcctctga

SEQ ID NO: 14244 - RNA, 20 nt, Homo sapiens
  source 1..20: mol_type = genomic RNA
ggcctgaagagtcctctgaa

SEQ ID NO: 14245 - RNA, 20 nt, Homo sapiens
  source 1..20: mol_type = genomic RNA
gcctgaagagtcctctgaat

SEQ ID NO: 14246 - RNA, 20 nt, Homo sapiens
  source 1..20: mol_type = genomic RNA
cctgaagagtcctctgaatg

SEQ ID NO: 14247 - RNA, 20 nt, Homo sapiens
  source 1..20: mol_type = genomic RNA
ctgaagagtcctctgaatga

SEQ ID NO: 14248 - RNA, 20 nt, Homo sapiens
  source 1..20: mol_type = genomic RNA
tgaagagtcctctgaatgaa

SEQ ID NO: 14249 - RNA, 20 nt, Homo sapiens
  source 1..20: mol_type = genomic RNA
gaagagtcctctgaatgaac

SEQ ID NO: 14250 - RNA, 20 nt, Homo sapiens
  source 1..20: mol_type = genomic RNA
aagagtcctctgaatgaacc

SEQ ID NO: 14251 - RNA, 20 nt, Homo sapiens
  source 1..20: mol_type = genomic RNA
agagtcctctgaatgaacct

SEQ ID NO: 14252 - RNA, 20 nt, Homo sapiens
  source 1..20: mol_type = genomic RNA
gagtcctctgaatgaacctt

SEQ ID NO: 14253 - RNA, 20 nt, Homo sapiens
  source 1..20: mol_type = genomic RNA
agtcctctgaatgaaccttc

SEQ ID NO: 14254 - RNA, 20 nt, Homo sapiens
  source 1..20: mol_type = genomic RNA
gtcctctgaatgaaccttct

SEQ ID NO: 14255 - RNA, 20 nt, Homo sapiens
  source 1..20: mol_type = genomic RNA
tcctctgaatgaaccttctg

SEQ ID NO: 14256 - RNA, 20 nt, Homo sapiens
  source 1..20: mol_type = genomic RNA
cctctgaatgaaccttctgg

SEQ ID NO: 14257 - RNA, 20 nt, Homo sapiens
  source 1..20: mol_type = genomic RNA
ctctgaatgaaccttctggc

SEQ ID NO: 14258 - RNA, 20 nt, Homo sapiens
  source 1..20: mol_type = genomic RNA
tctgaatgaaccttctggcc

SEQ ID NO: 14259 - RNA, 20 nt, Homo sapiens
  source 1..20: mol_type = genomic RNA
ctgaatgaaccttctggcct

SEQ ID NO: 14260 - RNA, 20 nt, Homo sapiens
  source 1..20: mol_type = genomic RNA
tgaatgaaccttctggcctc

SEQ ID NO: 14261 - RNA, 20 nt, Homo sapiens
  source 1..20: mol_type = genomic RNA
gaatgaaccttctggcctcc

SEQ ID NO: 14262 - RNA, 20 nt, Homo sapiens
  source 1..20: mol_type = genomic RNA
aatgaaccttctggcctccc

SEQ ID NO: 14263 - RNA, 20 nt, Homo sapiens
  source 1..20: mol_type = genomic RNA
atgaaccttctggcctccca

SEQ ID NO: 14264 - RNA, 20 nt, Homo sapiens
  source 1..20: mol_type = genomic RNA
tgaaccttctggcctcccac

SEQ ID NO: 14265 - RNA, 20 nt, Homo sapiens
  source 1..20: mol_type = genomic RNA
gaaccttctggcctcccaca

SEQ ID NO: 14266 - RNA, 20 nt, Homo sapiens
  source 1..20: mol_type = genomic RNA
aaccttctggcctcccacag

SEQ ID NO: 14267 - RNA, 20 nt, Homo sapiens
  source 1..20: mol_type = genomic RNA
accttctggcctcccacaga

SEQ ID NO: 14268 - RNA, 20 nt, Homo sapiens
  source 1..20: mol_type = genomic RNA
ccttctggcctcccacagac

SEQ ID NO: 14269 - RNA, 20 nt, Homo sapiens
  source 1..20: mol_type = genomic RNA
cttctggcctcccacagact

SEQ ID NO: 14270 - RNA, 20 nt, Homo sapiens
  source 1..20: mol_type = genomic RNA
ttctggcctcccacagactc

SEQ ID NO: 14271 - RNA, 20 nt, Homo sapiens
  source 1..20: mol_type = genomic RNA
tctggcctcccacagactca

SEQ ID NO: 14272 - RNA, 20 nt, Homo sapiens
  source 1..20: mol_type = genomic RNA
ctggcctcccacagactcaa

SEQ ID NO: 14273 - RNA, 20 nt, Homo sapiens
  source 1..20: mol_type = genomic RNA
tggcctcccacagactcaaa

SEQ ID NO: 14274 - RNA, 20 nt, Homo sapiens
  source 1..20: mol_type = genomic RNA
ggcctcccacagactcaaat

SEQ ID NO: 14275 - RNA, 20 nt, Homo sapiens
  source 1..20: mol_type = genomic RNA
gcctcccacagactcaaatg

SEQ ID NO: 14276 - RNA, 20 nt, Homo sapiens
  source 1..20: mol_type = genomic RNA
cctcccacagactcaaatgc

SEQ ID NO: 14277 - RNA, 20 nt, Homo sapiens
  source 1..20: mol_type = genomic RNA
ctcccacagactcaaatgct

SEQ ID NO: 14278 - RNA, 20 nt, Homo sapiens
  source 1..20: mol_type = genomic RNA
tcccacagactcaaatgctc

SEQ ID NO: 14279 - RNA, 20 nt, Homo sapiens
  source 1..20: mol_type = genomic RNA
cccacagactcaaatgctca

SEQ ID NO: 14280 - RNA, 20 nt, Homo sapiens
  source 1..20: mol_type = genomic RNA
ccacagactcaaatgctcag

SEQ ID NO: 14281 - RNA, 20 nt, Homo sapiens
  source 1..20: mol_type = genomic RNA
cacagactcaaatgctcaga

SEQ ID NO: 14282 - RNA, 20 nt, Homo sapiens
  source 1..20: mol_type = genomic RNA
acagactcaaatgctcagac

SEQ ID NO: 14283 - RNA, 20 nt, Homo sapiens
  source 1..20: mol_type = genomic RNA
cagactcaaatgctcagacc

SEQ ID NO: 14284 - RNA, 20 nt, Homo sapiens
  source 1..20: mol_type = genomic RNA
agactcaaatgctcagacca

SEQ ID NO: 14285 - RNA, 20 nt, Homo sapiens
  source 1..20: mol_type = genomic RNA
gactcaaatgctcagaccag

SEQ ID NO: 14286 - RNA, 20 nt, Homo sapiens
  source 1..20: mol_type = genomic RNA
actcaaatgctcagaccagc

SEQ ID NO: 14287 - RNA, 20 nt, Homo sapiens
  source 1..20: mol_type = genomic RNA
ctcaaatgctcagaccagct

SEQ ID NO: 14288 - RNA, 20 nt, Homo sapiens
  source 1..20: mol_type = genomic RNA
tcaaatgctcagaccagctc

SEQ ID NO: 14289 - RNA, 20 nt, Homo sapiens
  source 1..20: mol_type = genomic RNA
caaatgctcagaccagctct

SEQ ID NO: 14290 - RNA, 20 nt, Homo sapiens
  source 1..20: mol_type = genomic RNA
aaatgctcagaccagctctt

SEQ ID NO: 14291 - RNA, 20 nt, Homo sapiens
  source 1..20: mol_type = genomic RNA
aatgctcagaccagctcttc

SEQ ID NO: 14292 - RNA, 20 nt, Homo sapiens
  source 1..20: mol_type = genomic RNA
atgctcagaccagctcttcc

SEQ ID NO: 14293 - RNA, 20 nt, Homo sapiens
  source 1..20: mol_type = genomic RNA
tgctcagaccagctcttccg

SEQ ID NO: 14294 - RNA, 20 nt, Homo sapiens
  source 1..20: mol_type = genomic RNA
gctcagaccagctcttccga

SEQ ID NO: 14295 - RNA, 20 nt, Homo sapiens
  source 1..20: mol_type = genomic RNA
ctcagaccagctcttccgaa

SEQ ID NO: 14296 - RNA, 20 nt, Homo sapiens
  source 1..20: mol_type = genomic RNA
tcagaccagctcttccgaaa

SEQ ID NO: 14297 - RNA, 20 nt, Homo sapiens
  source 1..20: mol_type = genomic RNA
cagaccagctcttccgaaaa

SEQ ID NO: 14298 - RNA, 20 nt, Homo sapiens
  source 1..20: mol_type = genomic RNA
agaccagctcttccgaaaac

SEQ ID NO: 14299 - RNA, 20 nt, Homo sapiens
  source 1..20: mol_type = genomic RNA
gaccagctcttccgaaaacc

SEQ ID NO: 14300 - RNA, 20 nt, Homo sapiens
  source 1..20: mol_type = genomic RNA
accagctcttccgaaaacca

SEQ ID NO: 14301 - RNA, 20 nt, Homo sapiens
  source 1..20: mol_type = genomic RNA
ccagctcttccgaaaaccag

SEQ ID NO: 14302 - RNA, 20 nt, Homo sapiens
  source 1..20: mol_type = genomic RNA
cagctcttccgaaaaccagg

SEQ ID NO: 14303 - RNA, 20 nt, Homo sapiens
  source 1..20: mol_type = genomic RNA
agctcttccgaaaaccaggc

SEQ ID NO: 14304 - RNA, 20 nt, Homo sapiens
  source 1..20: mol_type = genomic RNA
gctcttccgaaaaccaggcc

SEQ ID NO: 14305 - RNA, 20 nt, Homo sapiens
  source 1..20: mol_type = genomic RNA
ctcttccgaaaaccaggcct

SEQ ID NO: 14306 - RNA, 20 nt, Homo sapiens
  source 1..20: mol_type = genomic RNA
tcttccgaaaaccaggcctt

SEQ ID NO: 14307 - RNA, 20 nt, Homo sapiens
  source 1..20: mol_type = genomic RNA
cttccgaaaaccaggcctta

SEQ ID NO: 14308 - RNA, 20 nt, Homo sapiens
  source 1..20: mol_type = genomic RNA
ttccgaaaaccaggccttat

SEQ ID NO: 14309 - RNA, 20 nt, Homo sapiens
  source 1..20: mol_type = genomic RNA
tccgaaaaccaggccttatc

SEQ ID NO: 14310 - RNA, 20 nt, Homo sapiens
  source 1..20: mol_type = genomic RNA
ccgaaaaccaggccttatct

SEQ ID NO: 14311 - RNA, 20 nt, Homo sapiens
  source 1..20: mol_type = genomic RNA
cgaaaaccaggccttatctc

SEQ ID NO: 14312 - RNA, 20 nt, Homo sapiens
  source 1..20: mol_type = genomic RNA
gaaaaccaggccttatctcc

SEQ ID NO: 14313 - RNA, 20 nt, Homo sapiens
  source 1..20: mol_type = genomic RNA
aaaaccaggccttatctcca

SEQ ID NO: 14314 - RNA, 20 nt, Homo sapiens
  source 1..20: mol_type = genomic RNA
aaaccaggccttatctccaa

SEQ ID NO: 14315 - RNA, 20 nt, Homo sapiens
  source 1..20: mol_type = genomic RNA
aaccaggccttatctccaag

SEQ ID NO: 14316 - RNA, 20 nt, Homo sapiens
  source 1..20: mol_type = genomic RNA
accaggccttatctccaaga

SEQ ID NO: 14317 - RNA, 20 nt, Homo sapiens
  source 1..20: mol_type = genomic RNA
ccaggccttatctccaagac

SEQ ID NO: 14318 - RNA, 20 nt, Homo sapiens
  source 1..20: mol_type = genomic RNA
caggccttatctccaagacc

SEQ ID NO: 14319 - RNA, 20 nt, Homo sapiens
  source 1..20: mol_type = genomic RNA
aggccttatctccaagacca

SEQ ID NO: 14320 - RNA, 20 nt, Homo sapiens
  source 1..20: mol_type = genomic RNA
ggccttatctccaagaccag

SEQ ID NO: 14321 - RNA, 20 nt, Homo sapiens
  source 1..20: mol_type = genomic RNA
gccttatctccaagaccaga

SEQ ID NO: 14322 - RNA, 20 nt, Homo sapiens
  source 1..20: mol_type = genomic RNA
ccttatctccaagaccagag

SEQ ID NO: 14323 - RNA, 20 nt, Homo sapiens
  source 1..20: mol_type = genomic RNA
cttatctccaagaccagaga

SEQ ID NO: 14324 - RNA, 20 nt, Homo sapiens
  source 1..20: mol_type = genomic RNA
ttatctccaagaccagagat

SEQ ID NO: 14325 - RNA, 20 nt, Homo sapiens
  source 1..20: mol_type = genomic RNA
tatctccaagaccagagata

SEQ ID NO: 14326 - RNA, 20 nt, Homo sapiens
  source 1..20: mol_type = genomic RNA
atctccaagaccagagatag

SEQ ID NO: 14327 - RNA, 20 nt, Homo sapiens
  source 1..20: mol_type = genomic RNA
tctccaagaccagagatagt

SEQ ID NO: 14328 - RNA, 20 nt, Homo sapiens
  source 1..20: mol_type = genomic RNA
ctccaagaccagagatagtg

SEQ ID NO: 14329 - RNA, 20 nt, Homo sapiens
  source 1..20: mol_type = genomic RNA
tccaagaccagagatagtgg

SEQ ID NO: 14330 - RNA, 20 nt, Homo sapiens
  source 1..20: mol_type = genomic RNA
ccaagaccagagatagtggg

SEQ ID NO: 14331 - RNA, 20 nt, Homo sapiens
  source 1..20: mol_type = genomic RNA
caagaccagagatagtgggg

SEQ ID NO: 14332 - RNA, 20 nt, Homo sapiens
  source 1..20: mol_type = genomic RNA
aagaccagagatagtgggga

SEQ ID NO: 14333 - RNA, 20 nt, Homo sapiens
  source 1..20: mol_type = genomic RNA
agaccagagatagtggggag

SEQ ID NO: 14334 - RNA, 20 nt, Homo sapiens
  source 1..20: mol_type = genomic RNA
gaccagagatagtggggaga

SEQ ID NO: 14335 - RNA, 20 nt, Homo sapiens
  source 1..20: mol_type = genomic RNA
accagagatagtggggagac

SEQ ID NO: 14336 - RNA, 20 nt, Homo sapiens
  source 1..20: mol_type = genomic RNA
ccagagatagtggggagact

SEQ ID NO: 14337 - RNA, 20 nt, Homo sapiens
  source 1..20: mol_type = genomic RNA
cagagatagtggggagactt

SEQ ID NO: 14338 - RNA, 20 nt, Homo sapiens
  source 1..20: mol_type = genomic RNA
agagatagtggggagacttc

SEQ ID NO: 14339 - RNA, 20 nt, Homo sapiens
  source 1..20: mol_type = genomic RNA
gagatagtggggagacttct

SEQ ID NO: 14340 - RNA, 20 nt, Homo sapiens
  source 1..20: mol_type = genomic RNA
agatagtggggagacttctt

SEQ ID NO: 14341 - RNA, 20 nt, Homo sapiens
  source 1..20: mol_type = genomic RNA
gatagtggggagacttcttg

SEQ ID NO: 14342 - RNA, 20 nt, Homo sapiens
  source 1..20: mol_type = genomic RNA
atagtggggagacttcttgg

SEQ ID NO: 14343 - RNA, 20 nt, Homo sapiens
  source 1..20: mol_type = genomic RNA
tagtggggagacttcttggc

SEQ ID NO: 14344 - RNA, 20 nt, Homo sapiens
  source 1..20: mol_type = genomic RNA
agtggggagacttcttggct

SEQ ID NO: 14345 - RNA, 20 nt, Homo sapiens
  source 1..20: mol_type = genomic RNA
gtggggagacttcttggctt

SEQ ID NO: 14346 - RNA, 20 nt, Homo sapiens
  source 1..20: mol_type = genomic RNA
tggggagacttcttggcttg

SEQ ID NO: 14347 - RNA, 20 nt, Homo sapiens
  source 1..20: mol_type = genomic RNA
ggggagacttcttggcttgg

SEQ ID NO: 14348 - RNA, 20 nt, Homo sapiens
  source 1..20: mol_type = genomic RNA
gggagacttcttggcttggt

SEQ ID NO: 14349 - RNA, 20 nt, Homo sapiens
  source 1..20: mol_type = genomic RNA
ggagacttcttggcttggtg

SEQ ID NO: 14350 - RNA, 20 nt, Homo sapiens
  source 1..20: mol_type = genomic RNA
gagacttcttggcttggtga

SEQ ID NO: 14351 - RNA, 20 nt, Homo sapiens
  source 1..20: mol_type = genomic RNA
agacttcttggcttggtgag

SEQ ID NO: 14352 - RNA, 20 nt, Homo sapiens
  source 1..20: mol_type = genomic RNA
gacttcttggcttggtgagg

SEQ ID NO: 14353 - RNA, 20 nt, Homo sapiens
  source 1..20: mol_type = genomic RNA
acttcttggcttggtgagga

SEQ ID NO: 14354 - RNA, 20 nt, Homo sapiens
  source 1..20: mol_type = genomic RNA
cttcttggcttggtgaggaa

SEQ ID NO: 14355 - RNA, 20 nt, Homo sapiens
  source 1..20: mol_type = genomic RNA
ttcttggcttggtgaggaaa

SEQ ID NO: 14356 - RNA, 20 nt, Homo sapiens
  source 1..20: mol_type = genomic RNA
tcttggcttggtgaggaaaa

SEQ ID NO: 14357 - RNA, 20 nt, Homo sapiens
  source 1..20: mol_type = genomic RNA
cttggcttggtgaggaaaag

SEQ ID NO: 14358 - RNA, 20 nt, Homo sapiens
  source 1..20: mol_type = genomic RNA
ttggcttggtgaggaaaagc

SEQ ID NO: 14359 - RNA, 20 nt, Homo sapiens
  source 1..20: mol_type = genomic RNA
tggcttggtgaggaaaagcg

SEQ ID NO: 14360 - RNA, 20 nt, Homo sapiens
  source 1..20: mol_type = genomic RNA
ggcttggtgaggaaaagcgg

SEQ ID NO: 14361 - RNA, 20 nt, Homo sapiens
  source 1..20: mol_type = genomic RNA
gcttggtgaggaaaagcgga

SEQ ID NO: 14362 - RNA, 20 nt, Homo sapiens
  source 1..20: mol_type = genomic RNA
cttggtgaggaaaagcggac

SEQ ID NO: 14363 - RNA, 20 nt, Homo sapiens
  source 1..20: mol_type = genomic RNA
ttggtgaggaaaagcggaca

SEQ ID NO: 14364 - RNA, 20 nt, Homo sapiens
  source 1..20: mol_type = genomic RNA
tggtgaggaaaagcggacat

SEQ ID NO: 14365 - RNA, 20 nt, Homo sapiens
  source 1..20: mol_type = genomic RNA
ggtgaggaaaagcggacatc

SEQ ID NO: 14366 - RNA, 20 nt, Homo sapiens
  source 1..20: mol_type = genomic RNA
gtgaggaaaagcggacatca

SEQ ID NO: 14367 - RNA, 20 nt, Homo sapiens
  source 1..20: mol_type = genomic RNA
tgaggaaaagcggacatcag

SEQ ID NO: 14368 - RNA, 20 nt, Homo sapiens
  source 1..20: mol_type = genomic RNA
gaggaaaagcggacatcagc

SEQ ID NO: 14369 - RNA, 20 nt, Homo sapiens
  source 1..20: mol_type = genomic RNA
aggaaaagcggacatcagct

SEQ ID NO: 14370 - RNA, 20 nt, Homo sapiens
  source 1..20: mol_type = genomic RNA
ggaaaagcggacatcagctg

SEQ ID NO: 14371 - RNA, 20 nt, Homo sapiens
  source 1..20: mol_type = genomic RNA
gaaaagcggacatcagctgg

SEQ ID NO: 14372 - RNA, 20 nt, Homo sapiens
  source 1..20: mol_type = genomic RNA
aaaagcggacatcagctggt

SEQ ID NO: 14373 - RNA, 20 nt, Homo sapiens
  source 1..20: mol_type = genomic RNA
aaagcggacatcagctggtc

SEQ ID NO: 14374 - RNA, 20 nt, Homo sapiens
  source 1..20: mol_type = genomic RNA
aagcggacatcagctggtca

SEQ ID NO: 14375 - RNA, 20 nt, Homo sapiens
  source 1..20: mol_type = genomic RNA
agcggacatcagctggtcaa

SEQ ID NO: 14376 - RNA, 20 nt, Homo sapiens
  source 1..20: mol_type = genomic RNA
gcggacatcagctggtcaaa

SEQ ID NO: 14377 - RNA, 20 nt, Homo sapiens
  source 1..20: mol_type = genomic RNA
cggacatcagctggtcaaac

SEQ ID NO: 14378 - RNA, 20 nt, Homo sapiens
  source 1..20: mol_type = genomic RNA
ggacatcagctggtcaaaca

SEQ ID NO: 14379 - RNA, 20 nt, Homo sapiens
  source 1..20: mol_type = genomic RNA
gacatcagctggtcaaacaa

SEQ ID NO: 14380 - RNA, 20 nt, Homo sapiens
  source 1..20: mol_type = genomic RNA
acatcagctggtcaaacaaa

SEQ ID NO: 14381 - RNA, 20 nt, Homo sapiens
  source 1..20: mol_type = genomic RNA
catcagctggtcaaacaaac

SEQ ID NO: 14382 - RNA, 20 nt, Homo sapiens
  source 1..20: mol_type = genomic RNA
atcagctggtcaaacaaact

SEQ ID NO: 14383 - RNA, 20 nt, Homo sapiens
  source 1..20: mol_type = genomic RNA
tcagctggtcaaacaaactc

SEQ ID NO: 14384 - RNA, 20 nt, Homo sapiens
  source 1..20: mol_type = genomic RNA
cagctggtcaaacaaactct

SEQ ID NO: 14385 - RNA, 20 nt, Homo sapiens
  source 1..20: mol_type = genomic RNA
agctggtcaaacaaactctc

SEQ ID NO: 14386 - RNA, 20 nt, Homo sapiens
  source 1..20: mol_type = genomic RNA
gctggtcaaacaaactctct

SEQ ID NO: 14387 - RNA, 20 nt, Homo sapiens
  source 1..20: mol_type = genomic RNA
ctggtcaaacaaactctctg

SEQ ID NO: 14388 - RNA, 20 nt, Homo sapiens
  source 1..20: mol_type = genomic RNA
tggtcaaacaaactctctga

SEQ ID NO: 14389 - RNA, 20 nt, Homo sapiens
  source 1..20: mol_type = genomic RNA
ggtcaaacaaactctctgaa

SEQ ID NO: 14390 - RNA, 20 nt, Homo sapiens
  source 1..20: mol_type = genomic RNA
gtcaaacaaactctctgaac

SEQ ID NO: 14391 - RNA, 20 nt, Homo sapiens
  source 1..20: mol_type = genomic RNA
tcaaacaaactctctgaacc

SEQ ID NO: 14392 - RNA, 20 nt, Homo sapiens
  source 1..20: mol_type = genomic RNA
caaacaaactctctgaaccc

SEQ ID NO: 14393 - RNA, 20 nt, Homo sapiens
  source 1..20: mol_type = genomic RNA
aaacaaactctctgaacccc

SEQ ID NO: 14394 - RNA, 20 nt, Homo sapiens
  source 1..20: mol_type = genomic RNA
aacaaactctctgaacccct

SEQ ID NO: 14395 - RNA, 20 nt, Homo sapiens
  source 1..20: mol_type = genomic RNA
acaaactctctgaacccctc

SEQ ID NO: 14396 - RNA, 20 nt, Homo sapiens
  source 1..20: mol_type = genomic RNA
caaactctctgaacccctcc

SEQ ID NO: 14397 - RNA, 20 nt, Homo sapiens
  source 1..20: mol_type = genomic RNA
aaactctctgaacccctccc

SEQ ID NO: 14398 - RNA, 20 nt, Homo sapiens
  source 1..20: mol_type = genomic RNA
aactctctgaacccctccct

SEQ ID NO: 14399 - RNA, 20 nt, Homo sapiens
  source 1..20: mol_type = genomic RNA
actctctgaacccctccctc

SEQ ID NO: 14400 - RNA, 20 nt, Homo sapiens
  source 1..20: mol_type = genomic RNA
ctctctgaacccctccctcc

SEQ ID NO: 14401 - RNA, 20 nt, Homo sapiens
  source 1..20: mol_type = genomic RNA
tctctgaacccctccctcca

SEQ ID NO: 14402 - RNA, 20 nt, Homo sapiens
  source 1..20: mol_type = genomic RNA
ctctgaacccctccctccat

SEQ ID NO: 14403 - RNA, 20 nt, Homo sapiens
  source 1..20: mol_type = genomic RNA
tctgaacccctccctccatc

SEQ ID NO: 14404 - RNA, 20 nt, Homo sapiens
  source 1..20: mol_type = genomic RNA
ctgaacccctccctccatcg

SEQ ID NO: 14405 - RNA, 20 nt, Homo sapiens
  source 1..20: mol_type = genomic RNA
tgaacccctccctccatcgt

SEQ ID NO: 14406 - RNA, 20 nt, Homo sapiens
  source 1..20: mol_type = genomic RNA
gaacccctccctccatcgtt

SEQ ID NO: 14407 - RNA, 20 nt, Homo sapiens
  source 1..20: mol_type = genomic RNA
aacccctccctccatcgttt

SEQ ID NO: 14408 - RNA, 20 nt, Homo sapiens
  source 1..20: mol_type = genomic RNA
acccctccctccatcgtttt

SEQ ID NO: 14409 - RNA, 20 nt, Homo sapiens
  source 1..20: mol_type = genomic RNA
cccctccctccatcgttttc

SEQ ID NO: 14410 - RNA, 20 nt, Homo sapiens
  source 1..20: mol_type = genomic RNA
ccctccctccatcgttttct

SEQ ID NO: 14411 - RNA, 20 nt, Homo sapiens
  source 1..20: mol_type = genomic RNA
cctccctccatcgttttctt

SEQ ID NO: 14412 - RNA, 20 nt, Homo sapiens
  source 1..20: mol_type = genomic RNA
ctccctccatcgttttcttc

SEQ ID NO: 14413 - RNA, 20 nt, Homo sapiens
  source 1..20: mol_type = genomic RNA
tccctccatcgttttcttca

SEQ ID NO: 14414 - RNA, 20 nt, Homo sapiens
  source 1..20: mol_type = genomic RNA
ccctccatcgttttcttcac

SEQ ID NO: 14415 - RNA, 20 nt, Homo sapiens
  source 1..20: mol_type = genomic RNA
cctccatcgttttcttcact

SEQ ID NO: 14416 - RNA, 20 nt, Homo sapiens
  source 1..20: mol_type = genomic RNA
ctccatcgttttcttcactg

SEQ ID NO: 14417 - RNA, 20 nt, Homo sapiens
  source 1..20: mol_type = genomic RNA
tccatcgttttcttcactgt

SEQ ID NO: 14418 - RNA, 20 nt, Homo sapiens
  source 1..20: mol_type = genomic RNA
ccatcgttttcttcactgtc

SEQ ID NO: 14419 - RNA, 20 nt, Homo sapiens
  source 1..20: mol_type = genomic RNA
catcgttttcttcactgtcc

SEQ ID NO: 14420 - RNA, 20 nt, Homo sapiens
  source 1..20: mol_type = genomic RNA
atcgttttcttcactgtcct

SEQ ID NO: 14421 - RNA, 20 nt, Homo sapiens
  source 1..20: mol_type = genomic RNA
tcgttttcttcactgtcctc

SEQ ID NO: 14422 - RNA, 20 nt, Homo sapiens
  source 1..20: mol_type = genomic RNA
cgttttcttcactgtcctcc

SEQ ID NO: 14423 - RNA, 20 nt, Homo sapiens
  source 1..20: mol_type = genomic RNA
gttttcttcactgtcctcca

SEQ ID NO: 14424 - RNA, 20 nt, Homo sapiens
  source 1..20: mol_type = genomic RNA
ttttcttcactgtcctccaa

SEQ ID NO: 14425 - RNA, 20 nt, Homo sapiens
  source 1..20: mol_type = genomic RNA
tttcttcactgtcctccaag

SEQ ID NO: 14426 - RNA, 20 nt, Homo sapiens
  source 1..20: mol_type = genomic RNA
ttcttcactgtcctccaagc

SEQ ID NO: 14427 - RNA, 20 nt, Homo sapiens
  source 1..20: mol_type = genomic RNA
tcttcactgtcctccaagcc

SEQ ID NO: 14428 - RNA, 20 nt, Homo sapiens
  source 1..20: mol_type = genomic RNA
cttcactgtcctccaagcca

SEQ ID NO: 14429 - RNA, 20 nt, Homo sapiens
  source 1..20: mol_type = genomic RNA
ttcactgtcctccaagccag

SEQ ID NO: 14430 - RNA, 20 nt, Homo sapiens
  source 1..20: mol_type = genomic RNA
tcactgtcctccaagccagc

SEQ ID NO: 14431 - RNA, 20 nt, Homo sapiens
  source 1..20: mol_type = genomic RNA
cactgtcctccaagccagcg

SEQ ID NO: 14432 - RNA, 20 nt, Homo sapiens
  source 1..20: mol_type = genomic RNA
actgtcctccaagccagcgg

SEQ ID NO: 14433 - RNA, 20 nt, Homo sapiens
  source 1..20: mol_type = genomic RNA
ctgtcctccaagccagcggg

SEQ ID NO: 14434 - RNA, 20 nt, Homo sapiens
  source 1..20: mol_type = genomic RNA
tgtcctccaagccagcggga

SEQ ID NO: 14435 - RNA, 20 nt, Homo sapiens
  source 1..20: mol_type = genomic RNA
gtcctccaagccagcgggaa

SEQ ID NO: 14436 - RNA, 20 nt, Homo sapiens
  source 1..20: mol_type = genomic RNA
tcctccaagccagcgggaat

SEQ ID NO: 14437 - RNA, 20 nt, Homo sapiens
  source 1..20: mol_type = genomic RNA
cctccaagccagcgggaatg

SEQ ID NO: 14438 - RNA, 20 nt, Homo sapiens
  source 1..20: mol_type = genomic RNA
ctccaagccagcgggaatgg

SEQ ID NO: 14439 - RNA, 20 nt, Homo sapiens
  source 1..20: mol_type = genomic RNA
tccaagccagcgggaatggc

SEQ ID NO: 14440 - RNA, 20 nt, Homo sapiens
  source 1..20: mol_type = genomic RNA
ccaagccagcgggaatggca

SEQ ID NO: 14441 - RNA, 20 nt, Homo sapiens
  source 1..20: mol_type = genomic RNA
caagccagcgggaatggcag

SEQ ID NO: 14442 - RNA, 20 nt, Homo sapiens
  source 1..20: mol_type = genomic RNA
aagccagcgggaatggcagc

SEQ ID NO: 14443 - RNA, 20 nt, Homo sapiens
  source 1..20: mol_type = genomic RNA
agccagcgggaatggcagct

SEQ ID NO: 14444 - RNA, 20 nt, Homo sapiens
  source 1..20: mol_type = genomic RNA
gccagcgggaatggcagctg

SEQ ID NO: 14445 - RNA, 20 nt, Homo sapiens
  source 1..20: mol_type = genomic RNA
ccagcgggaatggcagctgc

SEQ ID NO: 14446 - RNA, 20 nt, Homo sapiens
  source 1..20: mol_type = genomic RNA
cagcgggaatggcagctgcc

SEQ ID NO: 14447 - RNA, 20 nt, Homo sapiens
  source 1..20: mol_type = genomic RNA
agcgggaatggcagctgcca

SEQ ID NO: 14448 - RNA, 20 nt, Homo sapiens
  source 1..20: mol_type = genomic RNA
gcgggaatggcagctgccac

SEQ ID NO: 14449 - RNA, 20 nt, Homo sapiens
  source 1..20: mol_type = genomic RNA
cgggaatggcagctgccacg

SEQ ID NO: 14450 - RNA, 20 nt, Homo sapiens
  source 1..20: mol_type = genomic RNA
gggaatggcagctgccacgc

SEQ ID NO: 14451 - RNA, 20 nt, Homo sapiens
  source 1..20: mol_type = genomic RNA
ggaatggcagctgccacgcc

SEQ ID NO: 14452 - RNA, 20 nt, Homo sapiens
  source 1..20: mol_type = genomic RNA
gaatggcagctgccacgccg

SEQ ID NO: 14453 - RNA, 20 nt, Homo sapiens
  source 1..20: mol_type = genomic RNA
aatggcagctgccacgccgc

SEQ ID NO: 14454 - RNA, 20 nt, Homo sapiens
  source 1..20: mol_type = genomic RNA
atggcagctgccacgccgcc

SEQ ID NO: 14455 - RNA, 20 nt, Homo sapiens
  source 1..20: mol_type = genomic RNA
tggcagctgccacgccgccc

SEQ ID NO: 14456 - RNA, 20 nt, Homo sapiens
  source 1..20: mol_type = genomic RNA
ggcagctgccacgccgccct

SEQ ID NO: 14457 - RNA, 20 nt, Homo sapiens
  source 1..20: mol_type = genomic RNA
gcagctgccacgccgcccta

SEQ ID NO: 14458 - RNA, 20 nt, Homo sapiens
  source 1..20: mol_type = genomic RNA
cagctgccacgccgccctaa

SEQ ID NO: 14459 - RNA, 20 nt, Homo sapiens
  source 1..20: mol_type = genomic RNA
agctgccacgccgccctaaa

SEQ ID NO: 14460 - RNA, 20 nt, Homo sapiens
  source 1..20: mol_type = genomic RNA
gctgccacgccgccctaaaa

SEQ ID NO: 14461 - RNA, 20 nt, Homo sapiens
  source 1..20: mol_type = genomic RNA
ctgccacgccgccctaaaag

SEQ ID NO: 14462 - RNA, 20 nt, Homo sapiens
  source 1..20: mol_type = genomic RNA
tgccacgccgccctaaaagc

SEQ ID NO: 14463 - RNA, 20 nt, Homo sapiens
  source 1..20: mol_type = genomic RNA
gccacgccgccctaaaagca

SEQ ID NO: 14464 - RNA, 20 nt, Homo sapiens
  source 1..20: mol_type = genomic RNA
ccacgccgccctaaaagcac

SEQ ID NO: 14465 - RNA, 20 nt, Homo sapiens
  source 1..20: mol_type = genomic RNA
cacgccgccctaaaagcaca

SEQ ID NO: 14466 - RNA, 20 nt, Homo sapiens
  source 1..20: mol_type = genomic RNA
acgccgccctaaaagcacac

SEQ ID NO: 14467 - RNA, 20 nt, Homo sapiens
  source 1..20: mol_type = genomic RNA
cgccgccctaaaagcacact

SEQ ID NO: 14468 - RNA, 20 nt, Homo sapiens
  source 1..20: mol_type = genomic RNA
gccgccctaaaagcacactc

SEQ ID NO: 14469 - RNA, 20 nt, Homo sapiens
  source 1..20: mol_type = genomic RNA
ccgccctaaaagcacactca

SEQ ID NO: 14470 - RNA, 20 nt, Homo sapiens
  source 1..20: mol_type = genomic RNA
cgccctaaaagcacactcat

SEQ ID NO: 14471 - RNA, 20 nt, Homo sapiens
  source 1..20: mol_type = genomic RNA
gccctaaaagcacactcatc

SEQ ID NO: 14472 - RNA, 20 nt, Homo sapiens
  source 1..20: mol_type = genomic RNA
ccctaaaagcacactcatcc

SEQ ID NO: 14473 - RNA, 20 nt, Homo sapiens
  source 1..20: mol_type = genomic RNA
cctaaaagcacactcatccc

SEQ ID NO: 14474 - RNA, 20 nt, Homo sapiens
  source 1..20: mol_type = genomic RNA
ctaaaagcacactcatcccc

SEQ ID NO: 14475 - RNA, 20 nt, Homo sapiens
  source 1..20: mol_type = genomic RNA
taaaagcacactcatcccct

SEQ ID NO: 14476 - RNA, 20 nt, Homo sapiens
  source 1..20: mol_type = genomic RNA
aaaagcacactcatcccctc

SEQ ID NO: 14477 - RNA, 20 nt, Homo sapiens
  source 1..20: mol_type = genomic RNA
aaagcacactcatcccctca

SEQ ID NO: 14478 - RNA, 20 nt, Homo sapiens
  source 1..20: mol_type = genomic RNA
aagcacactcatcccctcac

SEQ ID NO: 14479 - RNA, 20 nt, Homo sapiens
  source 1..20: mol_type = genomic RNA
agcacactcatcccctcact

SEQ ID NO: 14480 - RNA, 20 nt, Homo sapiens
  source 1..20: mol_type = genomic RNA
gcacactcatcccctcactt

SEQ ID NO: 14481 - RNA, 20 nt, Homo sapiens
  source 1..20: mol_type = genomic RNA
cacactcatcccctcacttg

SEQ ID NO: 14482 - RNA, 20 nt, Homo sapiens
  source 1..20: mol_type = genomic RNA
acactcatcccctcacttgc

SEQ ID NO: 14483 - RNA, 20 nt, Homo sapiens
  source 1..20: mol_type = genomic RNA
cactcatcccctcacttgcc

SEQ ID NO: 14484 - RNA, 20 nt, Homo sapiens
  source 1..20: mol_type = genomic RNA
actcatcccctcacttgccg

SEQ ID NO: 14485 - RNA, 20 nt, Homo sapiens
  source 1..20: mol_type = genomic RNA
ctcatcccctcacttgccgc

SEQ ID NO: 14486 - RNA, 20 nt, Homo sapiens
  source 1..20: mol_type = genomic RNA
tcatcccctcacttgccgcg

SEQ ID NO: 14487 - RNA, 20 nt, Homo sapiens
  source 1..20: mol_type = genomic RNA
catcccctcacttgccgcgt

SEQ ID NO: 14488 - RNA, 20 nt, Homo sapiens
  source 1..20: mol_type = genomic RNA
atcccctcacttgccgcgtc

SEQ ID NO: 14489 - RNA, 20 nt, Homo sapiens
  source 1..20: mol_type = genomic RNA
tcccctcacttgccgcgtcg

SEQ ID NO: 14490 - RNA, 20 nt, Homo sapiens
  source 1..20: mol_type = genomic RNA
cccctcacttgccgcgtcgc

SEQ ID NO: 14491 - RNA, 20 nt, Homo sapiens
  source 1..20: mol_type = genomic RNA
ccctcacttgccgcgtcgcc

SEQ ID NO: 14492 - RNA, 20 nt, Homo sapiens
  source 1..20: mol_type = genomic RNA
cctcacttgccgcgtcgccc

SEQ ID NO: 14493 - RNA, 20 nt, Homo sapiens
  source 1..20: mol_type = genomic RNA
ctcacttgccgcgtcgccct

SEQ ID NO: 14494 - RNA, 20 nt, Homo sapiens
  source 1..20: mol_type = genomic RNA
tcacttgccgcgtcgccctc

SEQ ID NO: 14495 - RNA, 20 nt, Homo sapiens
  source 1..20: mol_type = genomic RNA
cacttgccgcgtcgccctcc

SEQ ID NO: 14496 - RNA, 20 nt, Homo sapiens
  source 1..20: mol_type = genomic RNA
acttgccgcgtcgccctccc

SEQ ID NO: 14497 - RNA, 20 nt, Homo sapiens
  source 1..20: mol_type = genomic RNA
cttgccgcgtcgccctccca

SEQ ID NO: 14498 - RNA, 20 nt, Homo sapiens
  source 1..20: mol_type = genomic RNA
ttgccgcgtcgccctcccag

SEQ ID NO: 14499 - RNA, 20 nt, Homo sapiens
  source 1..20: mol_type = genomic RNA
tgccgcgtcgccctcccagg

SEQ ID NO: 14500 - RNA, 20 nt, Homo sapiens
  source 1..20: mol_type = genomic RNA
gccgcgtcgccctcccaggc

SEQ ID NO: 14501 - RNA, 20 nt, Homo sapiens
  source 1..20: mol_type = genomic RNA
ccgcgtcgccctcccaggct

SEQ ID NO: 14502 - RNA, 20 nt, Homo sapiens
  source 1..20: mol_type = genomic RNA
cgcgtcgccctcccaggctc

SEQ ID NO: 14503 - RNA, 20 nt, Homo sapiens
  source 1..20: mol_type = genomic RNA
gcgtcgccctcccaggctct

SEQ ID NO: 14504 - RNA, 20 nt, Homo sapiens
  source 1..20: mol_type = genomic RNA
cgtcgccctcccaggctctc

SEQ ID NO: 14505 - RNA, 20 nt, Homo sapiens
  source 1..20: mol_type = genomic RNA
gtcgccctcccaggctctca

SEQ ID NO: 14506 - RNA, 20 nt, Homo sapiens
  source 1..20: mol_type = genomic RNA
tcgccctcccaggctctcaa

SEQ ID NO: 14507 - RNA, 20 nt, Homo sapiens
  source 1..20: mol_type = genomic RNA
cgccctcccaggctctcaac

SEQ ID NO: 14508 - RNA, 20 nt, Homo sapiens
  source 1..20: mol_type = genomic RNA
gccctcccaggctctcaaca

SEQ ID NO: 14509 - RNA, 20 nt, Homo sapiens
  source 1..20: mol_type = genomic RNA
ccctcccaggctctcaacag

SEQ ID NO: 14510 - RNA, 20 nt, Homo sapiens
  source 1..20: mol_type = genomic RNA
cctcccaggctctcaacagg

SEQ ID NO: 14511 - RNA, 20 nt, Homo sapiens
  source 1..20: mol_type = genomic RNA
ctcccaggctctcaacaggg

SEQ ID NO: 14512 - RNA, 20 nt, Homo sapiens
  source 1..20: mol_type = genomic RNA
tcccaggctctcaacagggg

SEQ ID NO: 14513 - RNA, 20 nt, Homo sapiens
  source 1..20: mol_type = genomic RNA
cccaggctctcaacagggga

SEQ ID NO: 14514 - RNA, 20 nt, Homo sapiens
  source 1..20: mol_type = genomic RNA
ccaggctctcaacaggggag

SEQ ID NO: 14515 - RNA, 20 nt, Homo sapiens
  source 1..20: mol_type = genomic RNA
caggctctcaacaggggaga

SEQ ID NO: 14516 - RNA, 20 nt, Homo sapiens
  source 1..20: mol_type = genomic RNA
aggctctcaacaggggagag

SEQ ID NO: 14517 - RNA, 20 nt, Homo sapiens
  source 1..20: mol_type = genomic RNA
ggctctcaacaggggagagt

SEQ ID NO: 14518 - RNA, 20 nt, Homo sapiens
  source 1..20: mol_type = genomic RNA
gctctcaacaggggagagtg

SEQ ID NO: 14519 - RNA, 20 nt, Homo sapiens
  source 1..20: mol_type = genomic RNA
ctctcaacaggggagagtgt

SEQ ID NO: 14520 - RNA, 20 nt, Homo sapiens
  source 1..20: mol_type = genomic RNA
tctcaacaggggagagtgtg

SEQ ID NO: 14521 - RNA, 20 nt, Homo sapiens
  source 1..20: mol_type = genomic RNA
ctcaacaggggagagtgtgg

SEQ ID NO: 14522 - RNA, 20 nt, Homo sapiens
  source 1..20: mol_type = genomic RNA
tcaacaggggagagtgtggt

SEQ ID NO: 14523 - RNA, 20 nt, Homo sapiens
  source 1..20: mol_type = genomic RNA
caacaggggagagtgtggtg

SEQ ID NO: 14524 - RNA, 20 nt, Homo sapiens
  source 1..20: mol_type = genomic RNA
aacaggggagagtgtggtgt

SEQ ID NO: 14525 - RNA, 20 nt, Homo sapiens
  source 1..20: mol_type = genomic RNA
acaggggagagtgtggtgtt

SEQ ID NO: 14526 - RNA, 20 nt, Homo sapiens
  source 1..20: mol_type = genomic RNA
caggggagagtgtggtgttt

SEQ ID NO: 14527 - RNA, 20 nt, Homo sapiens
  source 1..20: mol_type = genomic RNA
aggggagagtgtggtgtttc

SEQ ID NO: 14528 - RNA, 20 nt, Homo sapiens
  source 1..20: mol_type = genomic RNA
ggggagagtgtggtgtttcc

SEQ ID NO: 14529 - RNA, 20 nt, Homo sapiens
  source 1..20: mol_type = genomic RNA
gggagagtgtggtgtttcct

SEQ ID NO: 14530 - RNA, 20 nt, Homo sapiens
  source 1..20: mol_type = genomic RNA
ggagagtgtggtgtttcctg

SEQ ID NO: 14531 - RNA, 20 nt, Homo sapiens
  source 1..20: mol_type = genomic RNA
gagagtgtggtgtttcctgc

SEQ ID NO: 14532 - RNA, 20 nt, Homo sapiens
  source 1..20: mol_type = genomic RNA
agagtgtggtgtttcctgca

SEQ ID NO: 14533 - RNA, 20 nt, Homo sapiens
  source 1..20: mol_type = genomic RNA
gagtgtggtgtttcctgcag

SEQ ID NO: 14534 - RNA, 20 nt, Homo sapiens
  source 1..20: mol_type = genomic RNA
agtgtggtgtttcctgcagg

SEQ ID NO: 14535 - RNA, 20 nt, Homo sapiens
  source 1..20: mol_type = genomic RNA
gtgtggtgtttcctgcaggc

SEQ ID NO: 14536 - RNA, 20 nt, Homo sapiens
  source 1..20: mol_type = genomic RNA
tgtggtgtttcctgcaggcc

SEQ ID NO: 14537 - RNA, 20 nt, Homo sapiens
  source 1..20: mol_type = genomic RNA
gtggtgtttcctgcaggcca

SEQ ID NO: 14538 - RNA, 20 nt, Homo sapiens
  source 1..20: mol_type = genomic RNA
tggtgtttcctgcaggccag

SEQ ID NO: 14539 - RNA, 20 nt, Homo sapiens
  source 1..20: mol_type = genomic RNA
ggtgtttcctgcaggccagg

SEQ ID NO: 14540 - RNA, 20 nt, Homo sapiens
  source 1..20: mol_type = genomic RNA
gtgtttcctgcaggccaggc

SEQ ID NO: 14541 - RNA, 20 nt, Homo sapiens
  source 1..20: mol_type = genomic RNA
tgtttcctgcaggccaggcc

SEQ ID NO: 14542 - RNA, 20 nt, Homo sapiens
  source 1..20: mol_type = genomic RNA
gtttcctgcaggccaggcca

SEQ ID NO: 14543 - RNA, 20 nt, Homo sapiens
  source 1..20: mol_type = genomic RNA
tttcctgcaggccaggccag

SEQ ID NO: 14544 - RNA, 20 nt, Homo sapiens
  source 1..20: mol_type = genomic RNA
ttcctgcaggccaggccagc

SEQ ID NO: 14545 - RNA, 20 nt, Homo sapiens
  source 1..20: mol_type = genomic RNA
tcctgcaggccaggccagct

SEQ ID NO: 14546 - RNA, 20 nt, Homo sapiens
  source 1..20: mol_type = genomic RNA
cctgcaggccaggccagctg

SEQ ID NO: 14547 - RNA, 20 nt, Homo sapiens
  source 1..20: mol_type = genomic RNA
ctgcaggccaggccagctgc

SEQ ID NO: 14548 - RNA, 20 nt, Homo sapiens
  source 1..20: mol_type = genomic RNA
tgcaggccaggccagctgcc

SEQ ID NO: 14549 - RNA, 20 nt, Homo sapiens
  source 1..20: mol_type = genomic RNA
gcaggccaggccagctgcct

SEQ ID NO: 14550 - RNA, 20 nt, Homo sapiens
  source 1..20: mol_type = genomic RNA
caggccaggccagctgcctc

SEQ ID NO: 14551 - RNA, 20 nt, Homo sapiens
  source 1..20: mol_type = genomic RNA
aggccaggccagctgcctcc

SEQ ID NO: 14552 - RNA, 20 nt, Homo sapiens
  source 1..20: mol_type = genomic RNA
ggccaggccagctgcctccg

SEQ ID NO: 14553 - RNA, 20 nt, Homo sapiens
  source 1..20: mol_type = genomic RNA
gccaggccagctgcctccgc

SEQ ID NO: 14554 - RNA, 20 nt, Homo sapiens
  source 1..20: mol_type = genomic RNA
ccaggccagctgcctccgcg

SEQ ID NO: 14555 - RNA, 20 nt, Homo sapiens
  source 1..20: mol_type = genomic RNA
caggccagctgcctccgcgt

SEQ ID NO: 14556 - RNA, 20 nt, Homo sapiens
  source 1..20: mol_type = genomic RNA
aggccagctgcctccgcgtg

SEQ ID NO: 14557 - RNA, 20 nt, Homo sapiens
  source 1..20: mol_type = genomic RNA
ggccagctgcctccgcgtga

SEQ ID NO: 14558 - RNA, 20 nt, Homo sapiens
  source 1..20: mol_type = genomic RNA
gccagctgcctccgcgtgat

SEQ ID NO: 14559 - RNA, 20 nt, Homo sapiens
  source 1..20: mol_type = genomic RNA
ccagctgcctccgcgtgatc

SEQ ID NO: 14560 - RNA, 20 nt, Homo sapiens
  source 1..20: mol_type = genomic RNA
cagctgcctccgcgtgatca

SEQ ID NO: 14561 - RNA, 20 nt, Homo sapiens
  source 1..20: mol_type = genomic RNA
agctgcctccgcgtgatcaa

SEQ ID NO: 14562 - RNA, 20 nt, Homo sapiens
  source 1..20: mol_type = genomic RNA
gctgcctccgcgtgatcaaa

SEQ ID NO: 14563 - RNA, 20 nt, Homo sapiens
  source 1..20: mol_type = genomic RNA
ctgcctccgcgtgatcaaag

SEQ ID NO: 14564 - RNA, 20 nt, Homo sapiens
  source 1..20: mol_type = genomic RNA
tgcctccgcgtgatcaaagc

SEQ ID NO: 14565 - RNA, 20 nt, Homo sapiens
  source 1..20: mol_type = genomic RNA
gcctccgcgtgatcaaagcc

SEQ ID NO: 14566 - RNA, 20 nt, Homo sapiens
  source 1..20: mol_type = genomic RNA
cctccgcgtgatcaaagcca

SEQ ID NO: 14567 - RNA, 20 nt, Homo sapiens
  source 1..20: mol_type = genomic RNA
ctccgcgtgatcaaagccac

SEQ ID NO: 14568 - RNA, 20 nt, Homo sapiens
  source 1..20: mol_type = genomic RNA
tccgcgtgatcaaagccaca

SEQ ID NO: 14569 - RNA, 20 nt, Homo sapiens
  source 1..20: mol_type = genomic RNA
ccgcgtgatcaaagccacac

SEQ ID NO: 14570 - RNA, 20 nt, Homo sapiens
  source 1..20: mol_type = genomic RNA
cgcgtgatcaaagccacact

SEQ ID NO: 14571 - RNA, 20 nt, Homo sapiens
  source 1..20: mol_type = genomic RNA
gcgtgatcaaagccacactc

SEQ ID NO: 14572 - RNA, 20 nt, Homo sapiens
  source 1..20: mol_type = genomic RNA
cgtgatcaaagccacactct

SEQ ID NO: 14573 - RNA, 20 nt, Homo sapiens
  source 1..20: mol_type = genomic RNA
gtgatcaaagccacactctg

SEQ ID NO: 14574 - RNA, 20 nt, Homo sapiens
  source 1..20: mol_type = genomic RNA
tgatcaaagccacactctgg

SEQ ID NO: 14575 - RNA, 20 nt, Homo sapiens
  source 1..20: mol_type = genomic RNA
gatcaaagccacactctggg

SEQ ID NO: 14576 - RNA, 20 nt, Homo sapiens
  source 1..20: mol_type = genomic RNA
atcaaagccacactctgggc

SEQ ID NO: 14577 - RNA, 20 nt, Homo sapiens
  source 1..20: mol_type = genomic RNA
tcaaagccacactctgggct

SEQ ID NO: 14578 - RNA, 20 nt, Homo sapiens
  source 1..20: mol_type = genomic RNA
caaagccacactctgggctc

SEQ ID NO: 14579 - RNA, 20 nt, Homo sapiens
  source 1..20: mol_type = genomic RNA
aaagccacactctgggctcc

SEQ ID NO: 14580 - RNA, 20 nt, Homo sapiens
  source 1..20: mol_type = genomic RNA
aagccacactctgggctcca

SEQ ID NO: 14581 - RNA, 20 nt, Homo sapiens
  source 1..20: mol_type = genomic RNA
agccacactctgggctccag

SEQ ID NO: 14582 - RNA, 20 nt, Homo sapiens
  source 1..20: mol_type = genomic RNA
gccacactctgggctccaga

SEQ ID NO: 14583 - RNA, 20 nt, Homo sapiens
  source 1..20: mol_type = genomic RNA
ccacactctgggctccagag

SEQ ID NO: 14584 - RNA, 20 nt, Homo sapiens
  source 1..20: mol_type = genomic RNA
cacactctgggctccagagt

SEQ ID NO: 14585 - RNA, 20 nt, Homo sapiens
  source 1..20: mol_type = genomic RNA
acactctgggctccagagtg

SEQ ID NO: 14586 - RNA, 20 nt, Homo sapiens
  source 1..20: mol_type = genomic RNA
cactctgggctccagagtgg

SEQ ID NO: 14587 - RNA, 20 nt, Homo sapiens
  source 1..20: mol_type = genomic RNA
actctgggctccagagtggg

SEQ ID NO: 14588 - RNA, 20 nt, Homo sapiens
  source 1..20: mol_type = genomic RNA
ctctgggctccagagtgggg

SEQ ID NO: 14589 - RNA, 20 nt, Homo sapiens
  source 1..20: mol_type = genomic RNA
tctgggctccagagtgggga

SEQ ID NO: 14590 - RNA, 20 nt, Homo sapiens
  source 1..20: mol_type = genomic RNA
ctgggctccagagtggggat

SEQ ID NO: 14591 - RNA, 20 nt, Homo sapiens
  source 1..20: mol_type = genomic RNA
tgggctccagagtggggatg

SEQ ID NO: 14592 - RNA, 20 nt, Homo sapiens
  source 1..20: mol_type = genomic RNA
gggctccagagtggggatga

SEQ ID NO: 14593 - RNA, 20 nt, Homo sapiens
  source 1..20: mol_type = genomic RNA
ggctccagagtggggatgac

SEQ ID NO: 14594 - RNA, 20 nt, Homo sapiens
  source 1..20: mol_type = genomic RNA
gctccagagtggggatgaca

SEQ ID NO: 14595 - RNA, 20 nt, Homo sapiens
  source 1..20: mol_type = genomic RNA
ctccagagtggggatgacat

SEQ ID NO: 14596 - RNA, 20 nt, Homo sapiens
  source 1..20: mol_type = genomic RNA
tccagagtggggatgacatg

SEQ ID NO: 14597 - RNA, 20 nt, Homo sapiens
  source 1..20: mol_type = genomic RNA
ccagagtggggatgacatgc

SEQ ID NO: 14598 - RNA, 20 nt, Homo sapiens
  source 1..20: mol_type = genomic RNA
cagagtggggatgacatgca

SEQ ID NO: 14599 - RNA, 20 nt, Homo sapiens
  source 1..20: mol_type = genomic RNA
agagtggggatgacatgcac

SEQ ID NO: 14600 - RNA, 20 nt, Homo sapiens
  source 1..20: mol_type = genomic RNA
gagtggggatgacatgcact

SEQ ID NO: 14601 - RNA, 20 nt, Homo sapiens
  source 1..20: mol_type = genomic RNA
agtggggatgacatgcactc

SEQ ID NO: 14602 - RNA, 20 nt, Homo sapiens
  source 1..20: mol_type = genomic RNA
gtggggatgacatgcactca

SEQ ID NO: 14603 - RNA, 20 nt, Homo sapiens
  source 1..20: mol_type = genomic RNA
tggggatgacatgcactcag

SEQ ID NO: 14604 - RNA, 20 nt, Homo sapiens
  source 1..20: mol_type = genomic RNA
ggggatgacatgcactcagc

SEQ ID NO: 14605 - RNA, 20 nt, Homo sapiens
  source 1..20: mol_type = genomic RNA
gggatgacatgcactcagct

SEQ ID NO: 14606 - RNA, 20 nt, Homo sapiens
  source 1..20: mol_type = genomic RNA
ggatgacatgcactcagctc

SEQ ID NO: 14607 - RNA, 20 nt, Homo sapiens
  source 1..20: mol_type = genomic RNA
gatgacatgcactcagctct

SEQ ID NO: 14608 - RNA, 20 nt, Homo sapiens
  source 1..20: mol_type = genomic RNA
atgacatgcactcagctctt

SEQ ID NO: 14609 - RNA, 20 nt, Homo sapiens
  source 1..20: mol_type = genomic RNA
tgacatgcactcagctcttg

SEQ ID NO: 14610 - RNA, 20 nt, Homo sapiens
  source 1..20: mol_type = genomic RNA
gacatgcactcagctcttgg

SEQ ID NO: 14611 - RNA, 20 nt, Homo sapiens
  source 1..20: mol_type = genomic RNA
acatgcactcagctcttggc

SEQ ID NO: 14612 - RNA, 20 nt, Homo sapiens
  source 1..20: mol_type = genomic RNA
catgcactcagctcttggct

SEQ ID NO: 14613 - RNA, 20 nt, Homo sapiens
  source 1..20: mol_type = genomic RNA
atgcactcagctcttggctc

SEQ ID NO: 14614 - RNA, 20 nt, Homo sapiens
  source 1..20: mol_type = genomic RNA
tgcactcagctcttggctcc

SEQ ID NO: 14615 - RNA, 20 nt, Homo sapiens
  source 1..20: mol_type = genomic RNA
gcactcagctcttggctcca

SEQ ID NO: 14616 - RNA, 20 nt, Homo sapiens
  source 1..20: mol_type = genomic RNA
cactcagctcttggctccac

SEQ ID NO: 14617 - RNA, 20 nt, Homo sapiens
  source 1..20: mol_type = genomic RNA
actcagctcttggctccact

SEQ ID NO: 14618 - RNA, 20 nt, Homo sapiens
  source 1..20: mol_type = genomic RNA
ctcagctcttggctccactg

SEQ ID NO: 14619 - RNA, 20 nt, Homo sapiens
  source 1..20: mol_type = genomic RNA
tcagctcttggctccactgg

SEQ ID NO: 14620 - RNA, 20 nt, Homo sapiens
  source 1..20: mol_type = genomic RNA
cagctcttggctccactggg

SEQ ID NO: 14621 - RNA, 20 nt, Homo sapiens
  source 1..20: mol_type = genomic RNA
agctcttggctccactggga

SEQ ID NO: 14622 - RNA, 20 nt, Homo sapiens
  source 1..20: mol_type = genomic RNA
gctcttggctccactgggat

SEQ ID NO: 14623 - RNA, 20 nt, Homo sapiens
  source 1..20: mol_type = genomic RNA
ctcttggctccactgggatg

SEQ ID NO: 14624 - RNA, 20 nt, Homo sapiens
  source 1..20: mol_type = genomic RNA
tcttggctccactgggatgg

SEQ ID NO: 14625 - RNA, 20 nt, Homo sapiens
  source 1..20: mol_type = genomic RNA
cttggctccactgggatggg

SEQ ID NO: 14626 - RNA, 20 nt, Homo sapiens
  source 1..20: mol_type = genomic RNA
ttggctccactgggatggga

SEQ ID NO: 14627 - RNA, 20 nt, Homo sapiens
  source 1..20: mol_type = genomic RNA
tggctccactgggatgggag

SEQ ID NO: 14628 - RNA, 20 nt, Homo sapiens
  source 1..20: mol_type = genomic RNA
ggctccactgggatgggagg

SEQ ID NO: 14629 - RNA, 20 nt, Homo sapiens
  source 1..20: mol_type = genomic RNA
gctccactgggatgggagga

SEQ ID NO: 14630 - RNA, 20 nt, Homo sapiens
  source 1..20: mol_type = genomic RNA
ctccactgggatgggaggag

SEQ ID NO: 14631 - RNA, 20 nt, Homo sapiens
  source 1..20: mol_type = genomic RNA
tccactgggatgggaggaga

SEQ ID NO: 14632 - RNA, 20 nt, Homo sapiens
  source 1..20: mol_type = genomic RNA
ccactgggatgggaggagag

SEQ ID NO: 14633 - RNA, 20 nt, Homo sapiens
  source 1..20: mol_type = genomic RNA
cactgggatgggaggagagg

SEQ ID NO: 14634 - RNA, 20 nt, Homo sapiens
  source 1..20: mol_type = genomic RNA
actgggatgggaggagagga

SEQ ID NO: 14635 - RNA, 20 nt, Homo sapiens
  source 1..20: mol_type = genomic RNA
ctgggatgggaggagaggac

SEQ ID NO: 14636 - RNA, 20 nt, Homo sapiens
  source 1..20: mol_type = genomic RNA
tgggatgggaggagaggaca

SEQ ID NO: 14637 - RNA, 20 nt, Homo sapiens
  source 1..20: mol_type = genomic RNA
gggatgggaggagaggacaa

SEQ ID NO: 14638 - RNA, 20 nt, Homo sapiens
  source 1..20: mol_type = genomic RNA
ggatgggaggagaggacaag

SEQ ID NO: 14639 - RNA, 20 nt, Homo sapiens
  source 1..20: mol_type = genomic RNA
gatgggaggagaggacaagg

SEQ ID NO: 14640 - RNA, 20 nt, Homo sapiens
  source 1..20: mol_type = genomic RNA
atgggaggagaggacaaggg

SEQ ID NO: 14641 - RNA, 20 nt, Homo sapiens
  source 1..20: mol_type = genomic RNA
tgggaggagaggacaaggga

SEQ ID NO: 14642 - RNA, 20 nt, Homo sapiens
  source 1..20: mol_type = genomic RNA
gggaggagaggacaagggaa

SEQ ID NO: 14643 - RNA, 20 nt, Homo sapiens
  source 1..20: mol_type = genomic RNA
ggaggagaggacaagggaaa

SEQ ID NO: 14644 - RNA, 20 nt, Homo sapiens
  source 1..20: mol_type = genomic RNA
gaggagaggacaagggaaat

SEQ ID NO: 14645 - RNA, 20 nt, Homo sapiens
  source 1..20: mol_type = genomic RNA
aggagaggacaagggaaatg

SEQ ID NO: 14646 - RNA, 20 nt, Homo sapiens
  source 1..20: mol_type = genomic RNA
ggagaggacaagggaaatgt

SEQ ID NO: 14647 - RNA, 20 nt, Homo sapiens
  source 1..20: mol_type = genomic RNA
gagaggacaagggaaatgtc

SEQ ID NO: 14648 - RNA, 20 nt, Homo sapiens
  source 1..20: mol_type = genomic RNA
agaggacaagggaaatgtca

SEQ ID NO: 14649 - RNA, 20 nt, Homo sapiens
  source 1..20: mol_type = genomic RNA
gaggacaagggaaatgtcag

SEQ ID NO: 14650 - RNA, 20 nt, Homo sapiens
  source 1..20: mol_type = genomic RNA
aggacaagggaaatgtcagg

SEQ ID NO: 14651 - RNA, 20 nt, Homo sapiens
  source 1..20: mol_type = genomic RNA
ggacaagggaaatgtcaggg

SEQ ID NO: 14652 - RNA, 20 nt, Homo sapiens
  source 1..20: mol_type = genomic RNA
gacaagggaaatgtcagggg

SEQ ID NO: 14653 - RNA, 20 nt, Homo sapiens
  source 1..20: mol_type = genomic RNA
acaagggaaatgtcaggggc

SEQ ID NO: 14654 - RNA, 20 nt, Homo sapiens
  source 1..20: mol_type = genomic RNA
caagggaaatgtcaggggcg

SEQ ID NO: 14655 - RNA, 20 nt, Homo sapiens
  source 1..20: mol_type = genomic RNA
aagggaaatgtcaggggcgg

SEQ ID NO: 14656 - RNA, 20 nt, Homo sapiens
  source 1..20: mol_type = genomic RNA
agggaaatgtcaggggcggg

SEQ ID NO: 14657 - RNA, 20 nt, Homo sapiens
  source 1..20: mol_type = genomic RNA
gggaaatgtcaggggcgggg

SEQ ID NO: 14658 - RNA, 20 nt, Homo sapiens
  source 1..20: mol_type = genomic RNA
ggaaatgtcaggggcgggga

SEQ ID NO: 14659 - RNA, 20 nt, Homo sapiens
  source 1..20: mol_type = genomic RNA
gaaatgtcaggggcggggag

SEQ ID NO: 14660 - RNA, 20 nt, Homo sapiens
  source 1..20: mol_type = genomic RNA
aaatgtcaggggcggggagg

SEQ ID NO: 14661 - RNA, 20 nt, Homo sapiens
  source 1..20: mol_type = genomic RNA
aatgtcaggggcggggaggg

SEQ ID NO: 14662 - RNA, 20 nt, Homo sapiens
  source 1..20: mol_type = genomic RNA
atgtcaggggcggggagggt

SEQ ID NO: 14663 - RNA, 20 nt, Homo sapiens
  source 1..20: mol_type = genomic RNA
tgtcaggggcggggagggtg

SEQ ID NO: 14664 - RNA, 20 nt, Homo sapiens
  source 1..20: mol_type = genomic RNA
gtcaggggcggggagggtga

SEQ ID NO: 14665 - RNA, 20 nt, Homo sapiens
  source 1..20: mol_type = genomic RNA
tcaggggcggggagggtgac

SEQ ID NO: 14666 - RNA, 20 nt, Homo sapiens
  source 1..20: mol_type = genomic RNA
caggggcggggagggtgaca

SEQ ID NO: 14667 - RNA, 20 nt, Homo sapiens
  source 1..20: mol_type = genomic RNA
aggggcggggagggtgacag

SEQ ID NO: 14668 - RNA, 20 nt, Homo sapiens
  source 1..20: mol_type = genomic RNA
ggggcggggagggtgacagt

SEQ ID NO: 14669 - RNA, 20 nt, Homo sapiens
  source 1..20: mol_type = genomic RNA
gggcggggagggtgacagtg

SEQ ID NO: 14670 - RNA, 20 nt, Homo sapiens
  source 1..20: mol_type = genomic RNA
ggcggggagggtgacagtgg

SEQ ID NO: 14671 - RNA, 20 nt, Homo sapiens
  source 1..20: mol_type = genomic RNA
gcggggagggtgacagtggc

SEQ ID NO: 14672 - RNA, 20 nt, Homo sapiens
  source 1..20: mol_type = genomic RNA
cggggagggtgacagtggcc

SEQ ID NO: 14673 - RNA, 20 nt, Homo sapiens
  source 1..20: mol_type = genomic RNA
ggggagggtgacagtggccg

SEQ ID NO: 14674 - RNA, 20 nt, Homo sapiens
  source 1..20: mol_type = genomic RNA
gggagggtgacagtggccgc

SEQ ID NO: 14675 - RNA, 20 nt, Homo sapiens
  source 1..20: mol_type = genomic RNA
ggagggtgacagtggccgcc

SEQ ID NO: 14676 - RNA, 20 nt, Homo sapiens
  source 1..20: mol_type = genomic RNA
gagggtgacagtggccgccc

SEQ ID NO: 14677 - RNA, 20 nt, Homo sapiens
  source 1..20: mol_type = genomic RNA
agggtgacagtggccgccca

SEQ ID NO: 14678 - RNA, 20 nt, Homo sapiens
  source 1..20: mol_type = genomic RNA
gggtgacagtggccgcccaa

SEQ ID NO: 14679 - RNA, 20 nt, Homo sapiens
  source 1..20: mol_type = genomic RNA
ggtgacagtggccgcccaag

SEQ ID NO: 14680 - RNA, 20 nt, Homo sapiens
  source 1..20: mol_type = genomic RNA
gtgacagtggccgcccaagg

SEQ ID NO: 14681 - RNA, 20 nt, Homo sapiens
  source 1..20: mol_type = genomic RNA
tgacagtggccgcccaaggc

SEQ ID NO: 14682 - RNA, 20 nt, Homo sapiens
  source 1..20: mol_type = genomic RNA
gacagtggccgcccaaggcc

SEQ ID NO: 14683 - RNA, 20 nt, Homo sapiens
  source 1..20: mol_type = genomic RNA
acagtggccgcccaaggccc

SEQ ID NO: 14684 - RNA, 20 nt, Homo sapiens
  source 1..20: mol_type = genomic RNA
cagtggccgcccaaggccca

SEQ ID NO: 14685 - RNA, 20 nt, Homo sapiens
  source 1..20: mol_type = genomic RNA
agtggccgcccaaggcccac

SEQ ID NO: 14686 - RNA, 20 nt, Homo sapiens
  source 1..20: mol_type = genomic RNA
gtggccgcccaaggcccacg

SEQ ID NO: 14687 - RNA, 20 nt, Homo sapiens
  source 1..20: mol_type = genomic RNA
tggccgcccaaggcccacga

SEQ ID NO: 14688 - RNA, 20 nt, Homo sapiens
  source 1..20: mol_type = genomic RNA
ggccgcccaaggcccacgag

SEQ ID NO: 14689 - RNA, 20 nt, Homo sapiens
  source 1..20: mol_type = genomic RNA
gccgcccaaggcccacgagc

SEQ ID NO: 14690 - RNA, 20 nt, Homo sapiens
  source 1..20: mol_type = genomic RNA
ccgcccaaggcccacgagct

SEQ ID NO: 14691 - RNA, 20 nt, Homo sapiens
  source 1..20: mol_type = genomic RNA
cgcccaaggcccacgagctt

SEQ ID NO: 14692 - RNA, 20 nt, Homo sapiens
  source 1..20: mol_type = genomic RNA
gcccaaggcccacgagcttg

SEQ ID NO: 14693 - RNA, 20 nt, Homo sapiens
  source 1..20: mol_type = genomic RNA
cccaaggcccacgagcttgt

SEQ ID NO: 14694 - RNA, 20 nt, Homo sapiens
  source 1..20: mol_type = genomic RNA
ccaaggcccacgagcttgtt

SEQ ID NO: 14695 - RNA, 20 nt, Homo sapiens
  source 1..20: mol_type = genomic RNA
caaggcccacgagcttgttc

SEQ ID NO: 14696 - RNA, 20 nt, Homo sapiens
  source 1..20: mol_type = genomic RNA
aaggcccacgagcttgttct

SEQ ID NO: 14697 - RNA, 20 nt, Homo sapiens
  source 1..20: mol_type = genomic RNA
aggcccacgagcttgttctt

SEQ ID NO: 14698 - RNA, 20 nt, Homo sapiens
  source 1..20: mol_type = genomic RNA
ggcccacgagcttgttcttt

SEQ ID NO: 14699 - RNA, 20 nt, Homo sapiens
  source 1..20: mol_type = genomic RNA
gcccacgagcttgttctttg

SEQ ID NO: 14700 - RNA, 20 nt, Homo sapiens
  source 1..20: mol_type = genomic RNA
cccacgagcttgttctttgt

SEQ ID NO: 14701 - RNA, 20 nt, Homo sapiens
  source 1..20: mol_type = genomic RNA
ccacgagcttgttctttgtt

SEQ ID NO: 14702 - RNA, 20 nt, Homo sapiens
  source 1..20: mol_type = genomic RNA
cacgagcttgttctttgttc

SEQ ID NO: 14703 - RNA, 20 nt, Homo sapiens
  source 1..20: mol_type = genomic RNA
acgagcttgttctttgttct

SEQ ID NO: 14704 - RNA, 20 nt, Homo sapiens
  source 1..20: mol_type = genomic RNA
cgagcttgttctttgttctt

SEQ ID NO: 14705 - RNA, 20 nt, Homo sapiens
  source 1..20: mol_type = genomic RNA
gagcttgttctttgttcttt

SEQ ID NO: 14706 - RNA, 20 nt, Homo sapiens
  source 1..20: mol_type = genomic RNA
agcttgttctttgttctttg

SEQ ID NO: 14707 - RNA, 20 nt, Homo sapiens
  source 1..20: mol_type = genomic RNA
gcttgttctttgttctttgt

SEQ ID NO: 14708 - RNA, 20 nt, Homo sapiens
  source 1..20: mol_type = genomic RNA
cttgttctttgttctttgtc

SEQ ID NO: 14709 - RNA, 20 nt, Homo sapiens
  source 1..20: mol_type = genomic RNA
ttgttctttgttctttgtca

SEQ ID NO: 14710 - RNA, 20 nt, Homo sapiens
  source 1..20: mol_type = genomic RNA
tgttctttgttctttgtcac

SEQ ID NO: 14711 - RNA, 20 nt, Homo sapiens
  source 1..20: mol_type = genomic RNA
gttctttgttctttgtcaca

SEQ ID NO: 14712 - RNA, 20 nt, Homo sapiens
  source 1..20: mol_type = genomic RNA
ttctttgttctttgtcacag

SEQ ID NO: 14713 - RNA, 20 nt, Homo sapiens
  source 1..20: mol_type = genomic RNA
tctttgttctttgtcacagg

SEQ ID NO: 14714 - RNA, 20 nt, Homo sapiens
  source 1..20: mol_type = genomic RNA
ctttgttctttgtcacaggg

SEQ ID NO: 14715 - RNA, 20 nt, Homo sapiens
  source 1..20: mol_type = genomic RNA
tttgttctttgtcacaggga

SEQ ID NO: 14716 - RNA, 20 nt, Homo sapiens
  source 1..20: mol_type = genomic RNA
ttgttctttgtcacagggac

SEQ ID NO: 14717 - RNA, 20 nt, Homo sapiens
  source 1..20: mol_type = genomic RNA
tgttctttgtcacagggact

SEQ ID NO: 14718 - RNA, 20 nt, Homo sapiens
  source 1..20: mol_type = genomic RNA
gttctttgtcacagggactg

SEQ ID NO: 14719 - RNA, 20 nt, Homo sapiens
  source 1..20: mol_type = genomic RNA
ttctttgtcacagggactga

SEQ ID NO: 14720 - RNA, 20 nt, Homo sapiens
  source 1..20: mol_type = genomic RNA
tctttgtcacagggactgaa

SEQ ID NO: 14721 - RNA, 20 nt, Homo sapiens
  source 1..20: mol_type = genomic RNA
ctttgtcacagggactgaaa

SEQ ID NO: 14722 - RNA, 20 nt, Homo sapiens
  source 1..20: mol_type = genomic RNA
tttgtcacagggactgaaaa

SEQ ID NO: 14723 - RNA, 20 nt, Homo sapiens
  source 1..20: mol_type = genomic RNA
ttgtcacagggactgaaaac

SEQ ID NO: 14724 - RNA, 20 nt, Homo sapiens
  source 1..20: mol_type = genomic RNA
tgtcacagggactgaaaacc

SEQ ID NO: 14725 - RNA, 20 nt, Homo sapiens
  source 1..20: mol_type = genomic RNA
gtcacagggactgaaaacct

SEQ ID NO: 14726 - RNA, 20 nt, Homo sapiens
  source 1..20: mol_type = genomic RNA
tcacagggactgaaaacctc

SEQ ID NO: 14727 - RNA, 20 nt, Homo sapiens
  source 1..20: mol_type = genomic RNA
cacagggactgaaaacctct

SEQ ID NO: 14728 - RNA, 20 nt, Homo sapiens
  source 1..20: mol_type = genomic RNA
acagggactgaaaacctctc

SEQ ID NO: 14729 - RNA, 20 nt, Homo sapiens
  source 1..20: mol_type = genomic RNA
cagggactgaaaacctctcc

SEQ ID NO: 14730 - RNA, 20 nt, Homo sapiens
  source 1..20: mol_type = genomic RNA
agggactgaaaacctctcct

SEQ ID NO: 14731 - RNA, 20 nt, Homo sapiens
  source 1..20: mol_type = genomic RNA
gggactgaaaacctctcctc

SEQ ID NO: 14732 - RNA, 20 nt, Homo sapiens
  source 1..20: mol_type = genomic RNA
ggactgaaaacctctcctca

SEQ ID NO: 14733 - RNA, 20 nt, Homo sapiens
  source 1..20: mol_type = genomic RNA
gactgaaaacctctcctcat

SEQ ID NO: 14734 - RNA, 20 nt, Homo sapiens
  source 1..20: mol_type = genomic RNA
actgaaaacctctcctcatg

SEQ ID NO: 14735 - RNA, 20 nt, Homo sapiens
  source 1..20: mol_type = genomic RNA
ctgaaaacctctcctcatgt

SEQ ID NO: 14736 - RNA, 20 nt, Homo sapiens
  source 1..20: mol_type = genomic RNA
tgaaaacctctcctcatgtt

SEQ ID NO: 14737 - RNA, 20 nt, Homo sapiens
  source 1..20: mol_type = genomic RNA
gaaaacctctcctcatgttc

SEQ ID NO: 14738 - RNA, 20 nt, Homo sapiens
  source 1..20: mol_type = genomic RNA
aaaacctctcctcatgttct

SEQ ID NO: 14739 - RNA, 20 nt, Homo sapiens
  source 1..20: mol_type = genomic RNA
aaacctctcctcatgttctg

SEQ ID NO: 14740 - RNA, 20 nt, Homo sapiens
  source 1..20: mol_type = genomic RNA
aacctctcctcatgttctgc

SEQ ID NO: 14741 - RNA, 20 nt, Homo sapiens
  source 1..20: mol_type = genomic RNA
acctctcctcatgttctgct

SEQ ID NO: 14742 - RNA, 20 nt, Homo sapiens
  source 1..20: mol_type = genomic RNA
cctctcctcatgttctgctt

SEQ ID NO: 14743 - RNA, 20 nt, Homo sapiens
  source 1..20: mol_type = genomic RNA
ctctcctcatgttctgcttt

SEQ ID NO: 14744 - RNA, 20 nt, Homo sapiens
  source 1..20: mol_type = genomic RNA
tctcctcatgttctgctttc

SEQ ID NO: 14745 - RNA, 20 nt, Homo sapiens
  source 1..20: mol_type = genomic RNA
ctcctcatgttctgctttcg

SEQ ID NO: 14746 - RNA, 20 nt, Homo sapiens
  source 1..20: mol_type = genomic RNA
tcctcatgttctgctttcga

SEQ ID NO: 14747 - RNA, 20 nt, Homo sapiens
  source 1..20: mol_type = genomic RNA
cctcatgttctgctttcgat

SEQ ID NO: 14748 - RNA, 20 nt, Homo sapiens
  source 1..20: mol_type = genomic RNA
ctcatgttctgctttcgatt

SEQ ID NO: 14749 - RNA, 20 nt, Homo sapiens
  source 1..20: mol_type = genomic RNA
tcatgttctgctttcgattc

SEQ ID NO: 14750 - RNA, 20 nt, Homo sapiens
  source 1..20: mol_type = genomic RNA
catgttctgctttcgattcg

SEQ ID NO: 14751 - RNA, 20 nt, Homo sapiens
  source 1..20: mol_type = genomic RNA
atgttctgctttcgattcgt

SEQ ID NO: 14752 - RNA, 20 nt, Homo sapiens
  source 1..20: mol_type = genomic RNA
tgttctgctttcgattcgtt

SEQ ID NO: 14753 - RNA, 20 nt, Homo sapiens
  source 1..20: mol_type = genomic RNA
gttctgctttcgattcgtta

SEQ ID NO: 14754 - RNA, 20 nt, Homo sapiens
  source 1..20: mol_type = genomic RNA
ttctgctttcgattcgttaa

SEQ ID NO: 14755 - RNA, 20 nt, Homo sapiens
  source 1..20: mol_type = genomic RNA
tctgctttcgattcgttaag

SEQ ID NO: 14756 - RNA, 20 nt, Homo sapiens
  source 1..20: mol_type = genomic RNA
ctgctttcgattcgttaaga

SEQ ID NO: 14757 - RNA, 20 nt, Homo sapiens
  source 1..20: mol_type = genomic RNA
tgctttcgattcgttaagag

SEQ ID NO: 14758 - RNA, 20 nt, Homo sapiens
  source 1..20: mol_type = genomic RNA
gctttcgattcgttaagaga

SEQ ID NO: 14759 - RNA, 20 nt, Homo sapiens
  source 1..20: mol_type = genomic RNA
ctttcgattcgttaagagag

SEQ ID NO: 14760 - RNA, 20 nt, Homo sapiens
  source 1..20: mol_type = genomic RNA
tttcgattcgttaagagagc

SEQ ID NO: 14761 - RNA, 20 nt, Homo sapiens
  source 1..20: mol_type = genomic RNA
ttcgattcgttaagagagca

SEQ ID NO: 14762 - RNA, 20 nt, Homo sapiens
  source 1..20: mol_type = genomic RNA
tcgattcgttaagagagcaa

SEQ ID NO: 14763 - RNA, 20 nt, Homo sapiens
  source 1..20: mol_type = genomic RNA
cgattcgttaagagagcaac

SEQ ID NO: 14764 - RNA, 20 nt, Homo sapiens
  source 1..20: mol_type = genomic RNA
gattcgttaagagagcaaca

SEQ ID NO: 14765 - RNA, 20 nt, Homo sapiens
  source 1..20: mol_type = genomic RNA
attcgttaagagagcaacat

SEQ ID NO: 14766 - RNA, 20 nt, Homo sapiens
  source 1..20: mol_type = genomic RNA
ttcgttaagagagcaacatt

SEQ ID NO: 14767 - RNA, 20 nt, Homo sapiens
  source 1..20: mol_type = genomic RNA
tcgttaagagagcaacattt

SEQ ID NO: 14768 - RNA, 20 nt, Homo sapiens
  source 1..20: mol_type = genomic RNA
cgttaagagagcaacatttt

SEQ ID NO: 14769 - RNA, 20 nt, Homo sapiens
  source 1..20: mol_type = genomic RNA
gttaagagagcaacatttta

SEQ ID NO: 14770 - RNA, 20 nt, Homo sapiens
  source 1..20: mol_type = genomic RNA
ttaagagagcaacattttac

SEQ ID NO: 14771 - RNA, 20 nt, Homo sapiens
  source 1..20: mol_type = genomic RNA
taagagagcaacattttacc

SEQ ID NO: 14772 - RNA, 20 nt, Homo sapiens
  source 1..20: mol_type = genomic RNA
aagagagcaacattttaccc

SEQ ID NO: 14773 - RNA, 20 nt, Homo sapiens
  source 1..20: mol_type = genomic RNA
agagagcaacattttaccca

SEQ ID NO: 14774 - RNA, 20 nt, Homo sapiens
  source 1..20: mol_type = genomic RNA
gagagcaacattttacccac

SEQ ID NO: 14775 - RNA, 20 nt, Homo sapiens
  source 1..20: mol_type = genomic RNA
agagcaacattttacccaca

SEQ ID NO: 14776 - RNA, 20 nt, Homo sapiens
  source 1..20: mol_type = genomic RNA
gagcaacattttacccacac

SEQ ID NO: 14777 - RNA, 20 nt, Homo sapiens
  source 1..20: mol_type = genomic RNA
agcaacattttacccacaca

SEQ ID NO: 14778 - RNA, 20 nt, Homo sapiens
  source 1..20: mol_type = genomic RNA
gcaacattttacccacacac

SEQ ID NO: 14779 - RNA, 20 nt, Homo sapiens
  source 1..20: mol_type = genomic RNA
caacattttacccacacaca

SEQ ID NO: 14780 - RNA, 20 nt, Homo sapiens
  source 1..20: mol_type = genomic RNA
aacattttacccacacacag

SEQ ID NO: 14781 - RNA, 20 nt, Homo sapiens
  source 1..20: mol_type = genomic RNA
acattttacccacacacaga

SEQ ID NO: 14782 - RNA, 20 nt, Homo sapiens
  source 1..20: mol_type = genomic RNA
cattttacccacacacagat

SEQ ID NO: 14783 - RNA, 20 nt, Homo sapiens
  source 1..20: mol_type = genomic RNA
attttacccacacacagata

SEQ ID NO: 14784 - RNA, 20 nt, Homo sapiens
  source 1..20: mol_type = genomic RNA
ttttacccacacacagataa

SEQ ID NO: 14785 - RNA, 20 nt, Homo sapiens
  source 1..20: mol_type = genomic RNA
tttacccacacacagataaa

SEQ ID NO: 14786 - RNA, 20 nt, Homo sapiens
  source 1..20: mol_type = genomic RNA
ttacccacacacagataaag

SEQ ID NO: 14787 - RNA, 20 nt, Homo sapiens
  source 1..20: mol_type = genomic RNA
tacccacacacagataaagt

SEQ ID NO: 14788 - RNA, 20 nt, Homo sapiens
  source 1..20: mol_type = genomic RNA
acccacacacagataaagtt

SEQ ID NO: 14789 - RNA, 20 nt, Homo sapiens
  source 1..20: mol_type = genomic RNA
cccacacacagataaagttt

SEQ ID NO: 14790 - RNA, 20 nt, Homo sapiens
  source 1..20: mol_type = genomic RNA
ccacacacagataaagtttt

SEQ ID NO: 14791 - RNA, 20 nt, Homo sapiens
  source 1..20: mol_type = genomic RNA
cacacacagataaagttttc

SEQ ID NO: 14792 - RNA, 20 nt, Homo sapiens
  source 1..20: mol_type = genomic RNA
acacacagataaagttttcc

SEQ ID NO: 14793 - RNA, 20 nt, Homo sapiens
  source 1..20: mol_type = genomic RNA
cacacagataaagttttccc

SEQ ID NO: 14794 - RNA, 20 nt, Homo sapiens
  source 1..20: mol_type = genomic RNA
acacagataaagttttccct

SEQ ID NO: 14795 - RNA, 20 nt, Homo sapiens
  source 1..20: mol_type = genomic RNA
cacagataaagttttccctt

SEQ ID NO: 14796 - RNA, 20 nt, Homo sapiens
  source 1..20: mol_type = genomic RNA
acagataaagttttcccttg

SEQ ID NO: 14797 - RNA, 20 nt, Homo sapiens
  source 1..20: mol_type = genomic RNA
cagataaagttttcccttga

SEQ ID NO: 14798 - RNA, 20 nt, Homo sapiens
  source 1..20: mol_type = genomic RNA
agataaagttttcccttgag

SEQ ID NO: 14799 - RNA, 20 nt, Homo sapiens
  source 1..20: mol_type = genomic RNA
gataaagttttcccttgagg

SEQ ID NO: 14800 - RNA, 20 nt, Homo sapiens
  source 1..20: mol_type = genomic RNA
ataaagttttcccttgagga

SEQ ID NO: 14801 - RNA, 20 nt, Homo sapiens
  source 1..20: mol_type = genomic RNA
taaagttttcccttgaggaa

SEQ ID NO: 14802 - RNA, 20 nt, Homo sapiens
  source 1..20: mol_type = genomic RNA
aaagttttcccttgaggaaa

SEQ ID NO: 14803 - RNA, 20 nt, Homo sapiens
  source 1..20: mol_type = genomic RNA
aagttttcccttgaggaaac

SEQ ID NO: 14804 - RNA, 20 nt, Homo sapiens
  source 1..20: mol_type = genomic RNA
agttttcccttgaggaaaca

SEQ ID NO: 14805 - RNA, 20 nt, Homo sapiens
  source 1..20: mol_type = genomic RNA
gttttcccttgaggaaacaa

SEQ ID NO: 14806 - RNA, 20 nt, Homo sapiens
  source 1..20: mol_type = genomic RNA
ttttcccttgaggaaacaac

SEQ ID NO: 14807 - RNA, 20 nt, Homo sapiens
  source 1..20: mol_type = genomic RNA
tttcccttgaggaaacaaca

SEQ ID NO: 14808 - RNA, 20 nt, Homo sapiens
  source 1..20: mol_type = genomic RNA
ttcccttgaggaaacaacag

SEQ ID NO: 14809 - RNA, 20 nt, Homo sapiens
  source 1..20: mol_type = genomic RNA
tcccttgaggaaacaacagc

SEQ ID NO: 14810 - RNA, 20 nt, Homo sapiens
  source 1..20: mol_type = genomic RNA
cccttgaggaaacaacagct

SEQ ID NO: 14811 - RNA, 20 nt, Homo sapiens
  source 1..20: mol_type = genomic RNA
ccttgaggaaacaacagctt

SEQ ID NO: 14812 - RNA, 20 nt, Homo sapiens
  source 1..20: mol_type = genomic RNA
cttgaggaaacaacagcttt

SEQ ID NO: 14813 - RNA, 20 nt, Homo sapiens
  source 1..20: mol_type = genomic RNA
ttgaggaaacaacagcttta

SEQ ID NO: 14814 - RNA, 20 nt, Homo sapiens
  source 1..20: mol_type = genomic RNA
tgaggaaacaacagctttaa

SEQ ID NO: 14815 - RNA, 20 nt, Homo sapiens
  source 1..20: mol_type = genomic RNA
gaggaaacaacagctttaaa

SEQ ID NO: 14816 - RNA, 20 nt, Homo sapiens
  source 1..20: mol_type = genomic RNA
aggaaacaacagctttaaaa

SEQ ID NO: 14817 - RNA, 20 nt, Homo sapiens
  source 1..20: mol_type = genomic RNA
ggaaacaacagctttaaaag

SEQ ID NO: 14818 - RNA, 20 nt, Homo sapiens
  source 1..20: mol_type = genomic RNA
gaaacaacagctttaaaaga

SEQ ID NO: 14819 - RNA, 20 nt, Homo sapiens
  source 1..20: mol_type = genomic RNA
aaacaacagctttaaaagaa

SEQ ID NO: 14820 - RNA, 20 nt, Homo sapiens
  source 1..20: mol_type = genomic RNA
aacaacagctttaaaagaaa

SEQ ID NO: 14821 - RNA, 20 nt, Homo sapiens
  source 1..20: mol_type = genomic RNA
acaacagctttaaaagaaaa

SEQ ID NO: 14822 - RNA, 20 nt, Homo sapiens
  source 1..20: mol_type = genomic RNA
caacagctttaaaagaaaaa

SEQ ID NO: 14823 - RNA, 20 nt, Homo sapiens
  source 1..20: mol_type = genomic RNA
aacagctttaaaagaaaaag

SEQ ID NO: 14824 - RNA, 20 nt, Homo sapiens
  source 1..20: mol_type = genomic RNA
acagctttaaaagaaaaaga

SEQ ID NO: 14825 - RNA, 20 nt, Homo sapiens
  source 1..20: mol_type = genomic RNA
cagctttaaaagaaaaagaa

SEQ ID NO: 14826 - RNA, 20 nt, Homo sapiens
  source 1..20: mol_type = genomic RNA
agctttaaaagaaaaagaaa

SEQ ID NO: 14827 - RNA, 20 nt, Homo sapiens
  source 1..20: mol_type = genomic RNA
gctttaaaagaaaaagaaaa

SEQ ID NO: 14828 - RNA, 20 nt, Homo sapiens
  source 1..20: mol_type = genomic RNA
ctttaaaagaaaaagaaaaa

SEQ ID NO: 14829 - RNA, 20 nt, Homo sapiens
  source 1..20: mol_type = genomic RNA
tttaaaagaaaaagaaaaaa

SEQ ID NO: 14830 - RNA, 20 nt, Homo sapiens
  source 1..20: mol_type = genomic RNA
ttaaaagaaaaagaaaaaaa

SEQ ID NO: 14831 - RNA, 20 nt, Homo sapiens
  source 1..20: mol_type = genomic RNA
taaaagaaaaagaaaaaaaa

SEQ ID NO: 14832 - RNA, 20 nt, Homo sapiens
  source 1..20: mol_type = genomic RNA
aaaagaaaaagaaaaaaaaa

SEQ ID NO: 14833 - RNA, 20 nt, Homo sapiens
  source 1..20: mol_type = genomic RNA
aaagaaaaagaaaaaaaaag

SEQ ID NO: 14834 - RNA, 20 nt, Homo sapiens
  source 1..20: mol_type = genomic RNA
aagaaaaagaaaaaaaaagt

SEQ ID NO: 14835 - RNA, 20 nt, Homo sapiens
  source 1..20: mol_type = genomic RNA
agaaaaagaaaaaaaaagtc

SEQ ID NO: 14836 - RNA, 20 nt, Homo sapiens
  source 1..20: mol_type = genomic RNA
gaaaaagaaaaaaaaagtct

SEQ ID NO: 14837 - RNA, 20 nt, Homo sapiens
  source 1..20: mol_type = genomic RNA
aaaaagaaaaaaaaagtctt

SEQ ID NO: 14838 - RNA, 20 nt, Homo sapiens
  source 1..20: mol_type = genomic RNA
aaaagaaaaaaaaagtcttt

SEQ ID NO: 14839 - RNA, 20 nt, Homo sapiens
  source 1..20: mol_type = genomic RNA
aaagaaaaaaaaagtctttg

SEQ ID NO: 14840 - RNA, 20 nt, Homo sapiens
  source 1..20: mol_type = genomic RNA
aagaaaaaaaaagtctttgg

SEQ ID NO: 14841 - RNA, 20 nt, Homo sapiens
  source 1..20: mol_type = genomic RNA
agaaaaaaaaagtctttggt

SEQ ID NO: 14842 - RNA, 20 nt, Homo sapiens
  source 1..20: mol_type = genomic RNA
gaaaaaaaaagtctttggta

SEQ ID NO: 14843 - RNA, 20 nt, Homo sapiens
  source 1..20: mol_type = genomic RNA
aaaaaaaaagtctttggtaa

SEQ ID NO: 14844 - RNA, 20 nt, Homo sapiens
  source 1..20: mol_type = genomic RNA
aaaaaaaagtctttggtaaa

SEQ ID NO: 14845 - RNA, 20 nt, Homo sapiens
  source 1..20: mol_type = genomic RNA
aaaaaaagtctttggtaaat

SEQ ID NO: 14846 - RNA, 20 nt, Homo sapiens
  source 1..20: mol_type = genomic RNA
aaaaaagtctttggtaaatg

SEQ ID NO: 14847 - RNA, 20 nt, Homo sapiens
  source 1..20: mol_type = genomic RNA
aaaaagtctttggtaaatgg

SEQ ID NO: 14848 - RNA, 20 nt, Homo sapiens
  source 1..20: mol_type = genomic RNA
aaaagtctttggtaaatggc

SEQ ID NO: 14849 - RNA, 20 nt, Homo sapiens
  source 1..20: mol_type = genomic RNA
aaagtctttggtaaatggca

SEQ ID NO: 14850 - RNA, 20 nt, Homo sapiens
  source 1..20: mol_type = genomic RNA
aagtctttggtaaatggcaa

SEQ ID NO: 14851 - RNA, 20 nt, Homo sapiens
  source 1..20: mol_type = genomic RNA
agtctttggtaaatggcaaa

SEQ ID NO: 14852 - RNA, 20 nt, Homo sapiens
  source 1..20: mol_type = genomic RNA
gtctttggtaaatggcaaaa

SEQ ID NO: 14853 - RNA, 20 nt, Homo sapiens
  source 1..20: mol_type = genomic RNA
tctttggtaaatggcaaaaa

SEQ ID NO: 14854 - RNA, 20 nt, Homo sapiens
  source 1..20: mol_type = genomic RNA
ctttggtaaatggcaaaaaa

SEQ ID NO: 14855 - RNA, 20 nt, Homo sapiens
  source 1..20: mol_type = genomic RNA
tttggtaaatggcaaaaaaa

SEQ ID NO: 14856 - RNA, 20 nt, Homo sapiens
  source 1..20: mol_type = genomic RNA
ttggtaaatggcaaaaaaaa

SEQ ID NO: 14857 - RNA, 20 nt, Homo sapiens
  source 1..20: mol_type = genomic RNA
tggtaaatggcaaaaaaaaa

SEQ ID NO: 14858 - RNA, 20 nt, Homo sapiens
  source 1..20: mol_type = genomic RNA
ggtaaatggcaaaaaaaaaa

SEQ ID NO: 14859 - RNA, 20 nt, Homo sapiens
  source 1..20: mol_type = genomic RNA
gtaaatggcaaaaaaaaaaa

SEQ ID NO: 14860 - RNA, 20 nt, Homo sapiens
  source 1..20: mol_type = genomic RNA
taaatggcaaaaaaaaaaaa

SEQ ID NO: 14861 - RNA, 20 nt, Homo sapiens
  source 1..20: mol_type = genomic RNA
aaatggcaaaaaaaaaaaaa

SEQ ID NO: 14862 - RNA, 20 nt, Homo sapiens
  source 1..20: mol_type = genomic RNA
aatggcaaaaaaaaaaaaaa

SEQ ID NO: 14863 - RNA, 20 nt, Homo sapiens
  source 1..20: mol_type = genomic RNA
atggcaaaaaaaaaaaaaaa

SEQ ID NO: 14864 - RNA, 20 nt, Homo sapiens
  source 1..20: mol_type = genomic RNA
tggcaaaaaaaaaaaaaaaa

SEQ ID NO: 14865 - RNA, 20 nt, Homo sapiens
  source 1..20: mol_type = genomic RNA
ggcaaaaaaaaaaaaaaaaa

SEQ ID NO: 14866 - RNA, 20 nt, Homo sapiens
  source 1..20: mol_type = genomic RNA
gcaaaaaaaaaaaaaaaaaa

SEQ ID NO: 14867 - RNA, 20 nt, Homo sapiens
  source 1..20: mol_type = genomic RNA
caaaaaaaaaaaaaaaaaaa

SEQ ID NO: 14868 - RNA, 20 nt, Homo sapiens
  source 1..20: mol_type = genomic RNA
aaaaaaaaaaaaaaaaaaaa

SEQ ID NO: 14869 - RNA, 20 nt, Homo sapiens
  source 1..20: mol_type = genomic RNA
aaaaaaaaaaaaaaaaaaaa

SEQ ID NO: 14870 - RNA, 20 nt, Homo sapiens
  source 1..20: mol_type = genomic RNA
aaaaaaaaaaaaaaaaaaaa

SEQ ID NO: 14871 - RNA, 20 nt, Homo sapiens
  source 1..20: mol_type = genomic RNA
aaaaaaaaaaaaaaaaaaaa

SEQ ID NO: 14872 - RNA, 20 nt, Homo sapiens
  source 1..20: mol_type = genomic RNA
aaaaaaaaaaaaaaaaaaaa
